(19) United States
(12) Patent Application Publication
(10) Pub. No.: US 2021/0155701 A1
(43) Pub. Date: May 27, 2021

(54) POLYPEPTIDE COMPRISING IL-1R1 BINDING DOMAIN AND CARRYING MOIETY

(71) Applicant: Chugai Seiyaku Kabushiki Kaisha, Kita-ku, Tokyo (JP)

(72) Inventors: Maiko HOSHINO, Singapore (SG); Tomoyuki IGAWA, Singapore (SG); Naoka HIRONIWA, Shizuoka (JP)

(21) Appl. No.: 17/058,889

(22) PCT Filed: May 30, 2019
(86) PCT No.: PCT/JP2019/021462

§ 371 Date: Nov. 25, 2020

(30) Foreign Application Priority Data
May 30, 2018 (JP) 2018-103232

(51) Int. Cl. C07K 16/28

(52) U.S. Cl. CPC C07K 16/2866; C07K 2317/94; C07K 2317/569

(57) ABSTRACT

The present invention relates to a polypeptide comprising an antigen binding domain and a carrying moiety having an inhibiting domain that inhibits the antigen binding activity of the antigen binding domain, and having a longer half-life than that of the antigen binding domain existing alone, methods for producing and screening for the polypeptide, a pharmaceutical composition comprising the polypeptide, methods for producing and screening for an antigen binding domain whose antigen binding activity is inhibited by associating with particular VL, VH or VHH, and a fusion polypeptide library including an antigen binding domain whose antigen binding activity is inhibited by associating with particular VL, VH or VHH.

### TECHNICAL FIELD

[0001] The present invention relates to a polypeptide comprising an antigen binding domain that binds to IL-1R1 (IL-1R1 binding domain) and a carrying moiety having an inhibiting domain that inhibits the antigen binding activity of the IL-1R1 binding domain, and having a longer half-life than the half-life of the antigen binding domain which exists alone, methods for producing and screening for the polypeptide, a pharmaceutical composition comprising the polypeptide, methods for producing and screening for an IL-1R1 binding domain whose antigen binding activity can be inhibited by associating with particular VL, VH or VHH, and a library of fusion polypeptides in which an IL-1R1 binding domain whose antigen binding activity can be inhibited by associating with particular VL, VH or VHH.

[0002] The present invention also relates to a polypeptide comprising an antigen binding domain VL and a carrying moiety having an inhibiting domain that inhibits the antigen binding activity of the antigen binding domain VL, and having a longer half-life than the half-life of the antigen binding domain VL which exists alone, methods for producing and screening for the polypeptide, a pharmaceutical composition comprising the polypeptide, methods for producing and screening for an antigen binding domain VL whose antigen binding activity can be inhibited by associating with particular VL, VH or VHH, and a library of fusion polypeptides in which an antigen binding domain VL whose antigen binding activity can be inhibited by associating with particular VL, VH or VHH.

### BACKGROUND ART

[0003] Antibodies have received attention as drugs because of being highly stable in plasma and causing few adverse reactions. Among them, many IgG-type antibody drugs have been launched, and a large number of antibody drugs are currently under development (NPL 1 and NPL 2).

[0004] Rituxan against CD20, cetuximab against EGFR, Herceptin against HER2, and the like have been approved so far as therapeutic drugs for cancer using antibody drugs (NPL 3). These antibody molecules bind to their antigens expressed on cancer cells and thereby exert cytotoxic activity against the cancer cells through ADCC activity, etc. Such cytotoxic activity based on ADCC activity, etc. is known to depend on the number of antigens expressed on target cells of therapeutic antibodies (NPL 4). Therefore, high expression levels of targeted antigens are preferred from the viewpoint of the effects of therapeutic antibodies. However, if an antigen, albeit having a high expression level, is expressed in normal tissues, the cytotoxic activity based on ADCC activity, etc. is exerted against the normal cells. Hence, adverse reactions become a serious problem. Therefore, it is preferred that antigens targeted by therapeutic antibodies as therapeutic drugs for cancer should be expressed specifically on cancer cells. For example, an antibody molecule against EpCAM known as a cancer antigen had been considered promising as a therapeutic drug for cancer. However, the EpCAM antigen is known to be also expressed in the pancreas. In actuality, it has been reported in clinical trials that the administration of an anti-EpCAM antibody causes pancreatitis as an adverse reaction due to cytotoxic activity against the pancreas (NPL 5).

[0005] In the wake of the success of antibody drugs exerting cytotoxic activity based on ADCC activity, second-generation improved antibody molecules exerting strong cytotoxic activity have been reported as a result of, for example, enhancing ADCC activity by the removal of fucose from the N-linked oligosaccharide of a natural human IgG1 Fc region (NPL 6) or enhancing ADCC activity by enhancing binding to Fc gamma RIIIa through the amino acid substitution of a natural human IgG1 Fc region (NPL 7). Improved antibody molecules exerting stronger cytotoxic activity, such as an antibody drug conjugate (ADC) containing an antibody conjugated with a drug having strong cytotoxic activity (NPL 8), and a low-molecular antibody exerting cytotoxic activity against cancer cells by recruiting T cells to the cancer cells (NPL 9) have also been reported as antibody drugs exerting cytotoxic activity against cancer cells under a mechanism other than NK cell-mediated ADCC activity as mentioned above.

[0006] Such antibody molecules exerting stronger cytotoxic activity can exert cytotoxic activity even against cancer cells expressing an antigen at a level that is not high, but also exert cytotoxic activity against normal tissues expressing the antigen at a low level, similarly to cancer cells. In actuality, EGFR-BiTE, a bispecific antibody against CD3 and EGFR, can exert strong cytotoxic activity against cancer cells and exert an antitumor effect, by recruiting T cells to the cancer cells, as compared with cetuximab, natural human IgG1 against the EGFR antigen. On the other hand, it has also been found that serious adverse reactions appear by the administration of EGFR-BiTE to cynomolgus monkeys, because EGFR is also expressed in normal tissues (NPL 10). Also, ADC bivatuzumab mertansine containing mertansine conjugated with an antibody against CD44v6 highly expressed on cancer cells has been clinically found to cause severe dermal toxicity and hepatoxicity, because CD44v6 is also expressed in normal tissues (NPL 11).

[0007] As mentioned above, use of an antibody that can exert strong cytotoxic activity even against cancer cells expressing an antigen at low levels requires the target antigen to be expressed in an exceedingly cancer-specific manner. However, considering that a target antigen HER2 of Herceptin or a target antigen EGFR of cetuximab is also expressed in normal tissues, only a limited number of cancer antigens may be expressed in an exceedingly cancer-specific manner. Therefore, adverse reactions ascribable to a cytotoxic effect on normal tissues may become a problem, though cytotoxic activity against cancer can be strengthened.

[0008] Recently, ipilimumab, which enhances tumor immunity by inhibiting CTLA4 contributing to immunosuppression in cancer, has been shown to extend overall survival in metastatic melanoma (NPL 12). However, ipilimumab systemically inhibits CTLA4 and therefore advantageously causes autoimmune disease-like severe adverse reactions due to the systemic activation of immunity, though enhancing the tumor immunity (NPL 13).

[0009] Meanwhile, antibody drugs exerting a therapeutic effect by inhibiting inflammatory cytokines in inflammatory or autoimmune diseases are known as antibody drugs against diseases other than cancer (NPL 14). It is known that, for example, Remicade or Humira targeting TNF, and Actemra targeting IL-6R exert a high therapeutic effect on rheumatoid arthritis, whereas infectious disease is seen as an adverse reaction due to the systemic neutralization of these cytokines (NPL 15). Drugs targeting IL-1 signaling are evaluated in clinical study for osteoarthritis treatment. Similar to cytokine blockers above, increasing of infection and neutropenia were seen in those clinical trials due to the systemic neutralization of IL-1 signaling (NPL 19 and NPL 20).

[0010] Osteoarthritis (OA) is the most common degenerative joint disease among elderly people. OA affects majority of individuals over the age of 65 and is a leading musculoskeletal cause of impaired mobility. OA patients are suffering from cartilage matrix degradation, osteophyte generation and chronic pain in affected joints. Because the precise molecular mechanisms which are involved in the degradation of cartilage matrix and development of OA are poorly understood, there are currently no disease modifying drug for OA (NPL 21 and NPL 22).

[0011] Various techniques have been developed as techniques applicable to second-generation antibody drugs. For example, techniques of improving effector functions, antigen binding capacity, pharmacokinetics, or stability or reducing a risk of immunogenicity have been reported (NPL 16). However, there are still a few reports on techniques that allow antibody drugs to act specifically on a target tissue in order to solve adverse reactions as described above. The reported techniques include a method which involves: connecting an antibody to a masking peptide via a linker that is cleaved by protease expressed at a lesion site such as a cancer tissue or an inflammatory tissue, thereby masking the antigen binding site of the antibody with the masking peptide and inhibiting the antigen binding activity of the antibody; and dissociating the masking peptide therefrom by the protease cleavage of this linker so that the antibody restores its antigen binding activity and becomes capable of binding to the antigen in a target pathological tissue (NPL 17 and NPL 18 and PTL 1).

### CITATION LIST

### Patent Literature

[0012] [PTL 1] International Publication No. WO2010/081173

### Non Patent Literature

[0013] [NPL 1] Monoclonal antibody successes in the clinic. Janice M Reichert, Clark J Rosensweig, Laura B Faden & Matthew C Dewitz, Nat. Biotechnol. (2005) 23, 1073-1078
[0014] [NPL 2] The therapeutic antibodies market to 2008. Pavlou A K, Belsey M J., Eur. J. Pharm. Biopharm. (2005) 59 (3), 389-396
[0015] [NPL 3] Monoclonal antibodies: versatile platforms for cancer immunotherapy. Weiner L M, Surana R, Wang S., Nat. Rev. Immunol. (2010) 10 (5), 317-327
[0016] [NPL 4] Differential responses of human tumor cell lines to anti-p185HER2 monoclonal antibodies. Lewis G D, Figari I, Fendly B, Wong W L, Carter P, Gorman C, Shepard H M, Cancer Immunol Immunotherapy (1993) 37, 255-263
[0017] [NPL 5] ING-1, a monoclonal antibody targeting Ep-CAM in patients with advanced adenocarcinomas. de Bono J S, Tolcher A W, Forero A, Vanhove G F, Takimoto C, Bauer R J, Hammond L A, Patnaik A, White M L, Shen S, Khazaeli M B, Rowinsky E K, LoBuglio A F, Clin. Cancer Res. (2004) 10 (22), 7555-7565
[0018] [NPL 6] Non-fucosylated therapeutic antibodies as next-generation therapeutic antibodies. Satoh M, Iida S, Shitara K., Expert Opin. Biol. Ther. (2006) 6 (11), 1161-1173
[0019] [NPL 7] Optimizing engagement of the immune system by anti-tumor antibodies: an engineer's perspective. Desjarlais J R, Lazar G A, Zhukovsky E A, Chu S Y., Drug Discov. Today (2007) 12 (21-22), 898-910
[0020] [NPL 8] Antibody-drug conjugates: targeted drug delivery for cancer. Alley S C, Okeley N M, Senter P D., Curr. Opin. Chem. Biol. (2010) 14 (4), 529-537
[0021] [NPL 9] BiTE: Teaching antibodies to engage T-cells for cancer therapy. Baeuerle P A, Kufer P, Bargou R., Curr. Opin. Mol. Ther. (2009) 11 (1), 22-30
[0022] [NPL 10] T cell-engaging BiTE antibodies specific for EGFR potently eliminate KRAS- and BRAF-mutated colorectal cancer cells. Lutterbuese R, Raum T, Kischel R, Hoffmann P, Mangold S, Rattel B, Friedrich M, Thomas O, Lorenczewski G, Rau D, Schaller E, Herrmann I, Wolf A, Urbig T, Baeuerle P A, Kufer P., Proc. Natl. Acad. Sci. U.S.A. (2010) 107 (28), 12605-12610
[0023] [NPL 11] Phase I trial with the CD44v6-targeting immunoconjugate bivatuzumab mertansine in head and neck squamous cell carcinoma. Riechelmann H, Sauter A, Golze W, Hanft G, Schroen C, Hoermann K, Erhardt T, Gronau S., Oral Oncol. (2008) 44 (9), 823-829
[0024] [NPL 12] Ipilimumab in the treatment of melanoma. Trinh V A, Hwu W J., Expert Opin. Biol. Ther., (2012) Apr. 14 (doi: 10.1517/14712598.2012.675325)
[0025] [NPL 13] IPILIMUMAB—A NOVEL IMMUNOMODULATING THERAPY CAUSING AUTOIMMUNE HYPOPHYSITIS: A CASE REPORT AND REVIEW. Juszczak A, Gupta A, Karavitaki N, Middleton M R, Grossman A., Eur. J. Endocrinol. (2012) Apr. 10 (doi: 10.1530/EJE-12-0167)
[0026] [NPL 14] The Japanese experience with biologic therapies for rheumatoid arthritis. Takeuchi T, Kameda H., Nat. Rev. Rheumatol. (2010) 6 (11), 644-652
[0027] [NPL 15] Current evidence for the management of rheumatoid arthritis with biological disease-modifying antirheumatic drugs: a systematic literature review informing the EULAR recommendations for the management of RA. Nam J L, Winthrop K L, van Vollenhoven R F, Pavelka K, Valesini G, Hensor E M, Worthy G, Landewe R, Smolen J S, Emery P, Buch M H., Ann. Rheum. Dis. (2010) 69 (6), 976-986
[0028] [NPL 16] Antibody engineering for the development of therapeutic antibodies. Kim S J, Park Y, Hong H J., Mol. Cells. (2005) 20 (1), 17-29
[0029] [NPL 17] Tumor-specific activation of an EGFR-targeting probody enhances therapeutic index. Desnoyers L R, Vasiljeva O, Richardson J H, Yang A, Menendez E E, Liang T W, Wong C, Bessette P H, Kamath K, Moore S J, Sagert J G, Hostetter D R, Han F, Gee J, Flandez J, Markham K, Nguyen M, Krimm M, Wong K R, Liu S, Daugherty P S, West J W, Lowman H B. Sci Transl Med. 2013 Oct. 16; 5(207): 207ra144.
[0030] [NPL 18] Probody therapeutics for targeting antibodies to diseased tissue. Polu K R, Lowman H B. Expert Opin Biol Ther. 2014 August; 14(8): 1049-53.
[0031] [NPL 19] Arthritis Res Ther. 2011 Jul. 29; 13(4):R125. doi: 10.1186/ar3430
[0032] [NPL 20] Abstract of ACR/ARHP Annual Meeting, https://plan.core-apps.com/tristar_acr17/abstract/7f9a3c05b0ca255af1fc655b034e5eaa, Date of Search: Apr. 23, 2018
[0033] [NPL 21] Nature Reviews Disease Primers volume 2, Article number: 16072 (2016)
[0034] [NPL 22] Calcif Tissue Int. 2014 December; 95(6): 495-505

### SUMMARY OF INVENTION

### Technical Problem

[0035] The present inventors have thought that the techniques of dissociating, by protease cleavage, a masking peptide inhibiting the antigen binding activity of an antibody so that the antibody restores its antigen binding activity, as described above might cause adverse reactions, because the antibody cleaved at a lesion site may distribute to normal tissues through blood flow, as the cleavage by protease is irreversible. Further, there has been a problem that it is difficult for conventional antibodies to target antigens present in a deep part of a cartilage tissue since such antibodies have a high molecular weight.

[0036] The present invention has been made on the basis of such an idea. An object of the present invention is to provide a pharmaceutical composition useful in disease treatment with a reduced adverse reaction, and an active ingredient thereof. Further, an object of the present invention is to provide a pharmaceutical composition that can reach a deep part in a target cartilage tissue well, and an active ingredient thereof. Another object of the present invention is to provide methods for screening for and producing the pharmaceutical composition and the active ingredient.

### Solution to Problem

[0037] The present inventors have conducted diligent studies and consequently developed a polypeptide comprising an antigen binding domain and a carrying moiety having an inhibiting domain that inhibits the binding activity of the antigen binding domain, and having a longer half-life than the half-life of the antigen binding domain which exists alone. It is considered that use of the polypeptide can allow the antigen binding domain to restore its antigen binding activity in a disease tissue and exert the antigen binding activity in the disease tissue. Furthermore, the systemic distribution of an activated form of the antigen binding domain can be suppressed owing to the difference in half-life between the polypeptide comprising the antigen binding domain whose antigen binding activity is inhibited and a polypeptide comprising the antigen binding domain whose antigen binding activity is restored. Moreover, the present inventors have found that the polypeptide or a pharmaceutical composition comprising the polypeptide is useful in disease treatment and also found that: the polypeptide or the pharmaceutical composition is useful in disease treatment which involves administering the polypeptide; and the polypeptide is useful in the production of a drug for disease treatment. The present inventors have further developed methods for screening for and producing the polypeptide, methods for producing and screening for an antigen binding domain whose antigen binding activity can be inhibited by associating with particular VL, VH or VHH, and a library including an antigen binding domain whose antigen binding activity can be inhibited by associating with particular VL, VH or VHH, completing the present invention.

[0038] The present invention is based on these findings and specifically encompasses exemplary embodiments described below.
[0039] (A0) A polypeptide comprising an antigen binding domain and a carrying moiety, wherein the carrying moiety has an inhibiting domain that inhibits the antigen binding activity of the antigen binding domain, wherein the antigen is one or more molecules involved in IL-1 mediated signal transduction.
[0040] (A1) A polypeptide comprising an antigen binding domain and a carrying moiety, wherein the antigen binding domain has a shorter half-life in blood than that of the carrying moiety that has an inhibiting domain that inhibits the antigen binding activity of the antigen binding domain, wherein the antigen is one or more molecules involved in IL-1 mediated signal transduction.
[0041] (A2) The polypeptide according to (A0) or (A1), wherein the molecular weight of the antigen binding domain is smaller than that of the carrying moiety.
[0042] (A3) The polypeptide according to any of (A0) to (A2), wherein the molecular weight of the antigen binding domain is 120 kDa, 100 kDa, 80 kDa, 60 kDa, 40 kDa, 20 kDa or smaller.
[0043] (A4) The polypeptide according to any of (A0) to (A3), wherein the carrying moiety has FcRn binding activity, and the antigen binding domain has no FcRn binding activity or has weaker FcRn binding activity than that of the carrying moiety.
[0044] (A5) The polypeptide according to any of (A0) to (A4), wherein the antigen binding domain is capable of being released from the polypeptide, and the antigen binding domain released from the polypeptide has higher antigen binding activity than that before the release.
[0045] (A6) The polypeptide according to any of (A0) to (A5), wherein the inhibiting domain of the carrying moiety associates with the antigen binding domain and thereby inhibits the antigen binding activity of the antigen binding domain.
[0046] (A7) The polypeptide according to (A5), wherein the polypeptide comprises a cleavage site, wherein the cleavage site is cleaved so that the antigen binding domain becomes capable of being released from the polypeptide.
[0047] (A8) The polypeptide according to (A6), wherein the polypeptide comprises a cleavage site, wherein the cleavage site is cleaved so that the association of the inhibiting domain of the carrying moiety with the antigen binding domain is canceled.
[0048] (A9) The polypeptide according to (A7) or (A8), wherein in the polypeptide, the N terminus of the carrying moiety and the C terminus of the antigen binding domain are fused via a linker or without a linker, or wherein in the polypeptide, the C terminus of the carrying moiety and the N terminus of the antigen binding domain are fused via a linker or without a linker.
[0049] (A10) The polypeptide according to (A9), wherein the polypeptide further has a protease cleavage sequence, wherein the cleavage sequence is located between the N terminus of the carrying moiety and the C terminus of the antigen binding domain, the C terminus of the carrying moiety and the N terminus of the antigen binding domain, within the sequence of the antigen binding domain, or within the sequence of the carrying moiety.
[0050] (A11) The polypeptide according to (A7) or (A8), wherein the cleavage site comprises a protease cleavage sequence.
[0051] (A12) The polypeptide according to (A10) or (A11), wherein the protease is a target tissue specific protease.
[0052] (A13) The polypeptide according to (A12), wherein the target tissue is an inflammatory tissue.
[0053] (A14) The polypeptide according to (A10) or (A11), wherein the protease is at least one protease selected from matriptase, urokinase (uPA), and metalloproteinase.
[0054] (A15) The polypeptide according to (A14), wherein the protease is at least one protease selected from MT-SP1, uPA, MMP1, MMP2, MMP3, MMP7, MMP9, MMP13, MMP14, ADAM17, ADAMTS4, and ADAMTS5.
[0055] (A16) The polypeptide according to (A10) or (A11), wherein the protease cleavage sequence comprises a sequence selected from SEQ ID NOs: 508, 509 and 510.
[0056] (A17) The polypeptide according to any of (A11) to (A16), wherein a first flexible linker is further attached to one end of the protease cleavage sequence.
[0057] (A18) The polypeptide according to (A17), wherein a second flexible linker is further attached to the other end of the protease cleavage sequence.
[0058] (A19) The polypeptide according to (A17), wherein the first flexible linker is a flexible linker consisting of a glycine-serine polymer.
[0059] (A20) The polypeptide according to (A18), wherein the second flexible linker is a flexible linker consisting of a glycine-serine polymer.
[0060] (A21) The polypeptide according to any of (A0) to (A20), wherein the antigen binding domain comprises a single-domain antibody or IL-1R antagonist (IL-1Ra) or is a single-domain antibody or IL-1R antagonist, wherein the inhibiting domain of the carrying moiety inhibits the antigen binding activity of the single-domain antibody or IL-1R antagonist.
[0061] (A22) The polypeptide according to (A21), wherein the single-domain antibody is VHH, VH having antigen binding activity by itself, or VL having antigen binding activity by itself.
[0062] (A23) The polypeptide according to any of (A0) to (A22), wherein the antigen binding domain comprises a single-domain antibody, and the inhibiting domain of the carrying moiety is VHH, antibody VH, or antibody VL, wherein the antigen binding activity of the single-domain antibody is inhibited by the VHH, the antibody VH, or the antibody VL.
[0063] (A24) The polypeptide according to any of (A0) to (A23), wherein the antigen binding domain comprises a single-domain antibody, and the inhibiting domain of the carrying moiety is VHH, antibody VH, or antibody VL, wherein the antigen binding activity of the single-domain antibody is inhibited by associating with the VHH, the antibody VH, or the antibody VL.
[0064] (A25) The polypeptide according to any of (A21) to (A24), wherein the single-domain antibody is VHH or VH having antigen binding activity by itself, and the inhibiting domain of the carrying moiety is antibody VL, wherein the antigen binding activity of the VHH or the VH having antigen binding activity by itself is inhibited by associating with the antibody VL.
[0065] (A26) The polypeptide according to any of (A21) to (A25), wherein the single-domain antibody is VHH, wherein the VHH has an amino acid substitution at least one position selected from amino acid positions 37, 44, 45, and 47 (all according to the Kabat numbering).
[0066] (A27) The polypeptide according to any of (A21) to (A25), wherein the single-domain antibody is VHH, wherein the VHH contains at least one amino acid selected from amino acids 37V, 44G, 45L, and 47W (all according to the Kabat numbering).
[0067] (A28) The polypeptide according to any of (A21) to (A25), wherein the single-domain antibody is VHH, wherein the VHH contains at least one amino acid substitution selected from amino acid substitutions F37V, Y37V, E44G, Q44G, R45L, H45L, G47W, F47W, L47W, T47W, and S47W (all according to the Kabat numbering).
[0068] (A29) The polypeptide according to any of (A21) to (A25), wherein the single-domain antibody is VHH, wherein the VHH has amino acid substitutions at least one set of positions selected from positions 37/44, positions 37/45, positions 37/47, positions 44/45, positions 44/47, positions 45/47, positions 37/44/45, positions 37/44/47, positions 37/45/47, positions 44/45/47, and positions 37/44/45/47 (all according to the Kabat numbering).
[0069] (A30) The polypeptide according to any of (A21) to (A25), wherein the single-domain antibody is VHH, wherein the VHH contains at least one set of amino acids selected from 37V/44G, 37V/45L, 37V/47W, 44G/45L, 44G/47W, 45L/47W, 37V/44G/45L, 37V/44G/47W, 37V/45L/47W, 44G/45L/47W, and 37V/44G/45L/47W (all according to the Kabat numbering).
[0070] (A31) The polypeptide according to any of (A21) to (A25), wherein the single-domain antibody is VHH, wherein the VHH contains at least one set of amino acid substitutions selected from F37V/R45L, F37V/G47W, R45L/G47W, and F37V/R45L/G47W (all according to the Kabat numbering).
[0071] (A32) The polypeptide according to any of (A21) to (A24), wherein the single-domain antibody is VL having antigen binding activity by itself, and the inhibiting domain of the carrying moiety is antibody VH, wherein the antigen binding activity of the VL having antigen binding activity by itself is inhibited by associating with the antibody VH.
[0072] (A33) The polypeptide according to any of (A21) to (A24), wherein the single-domain antibody is VL having antigen binding activity by itself, and the inhibiting domain of the carrying moiety is antibody VL, wherein the antigen binding activity of the VL having antigen binding activity by itself is inhibited by associating with the antibody VL.
[0073] (A34) The polypeptide according to (A33), wherein the VL having antigen binding activity by itself comprises the amino acid sequence of SEQ ID NO: 479 or 480.
[0074] (A35) A polypeptide comprising an antigen binding domain and a carrying moiety, wherein the antigen binding domain has a shorter half-life in blood than that of the carrying moiety that has an inhibiting domain that inhibits the antigen binding activity of the antigen binding domain, wherein the antigen binding domain binds to an epitope within IL-1R1, IL-1alpha, IL-1beta and/or IL-1RAcP, and/or wherein the antigen is IL1-R1 and the antigen binding domain competes for binding to the epitope with a single-domain antibody VL selected from the group consisting of 1) and 2) below:
   [0075] 1) a single-domain antibody VL comprising the amino acid sequence of SEQ ID NO: 479, and
   [0076] 2) a single-domain antibody VL comprising the amino acid sequence of SEQ ID NO: 480.
[0077] (A36) A polypeptide comprising an antigen binding domain that binds to IL-1R1 (IL-1R1 binding domain) and a carrying moiety, wherein the antigen binding domain has a shorter half-life in blood than that of the carrying moiety that has an inhibiting domain that inhibits the IL-1R1 binding activity of the antigen binding domain, wherein the IL-1R1 binding domain does not compete with IL-1Ra or competes with IL-1Ra.
[0078] (A37) The polypeptide according to any of (A0) to (A34), wherein the antigen binding domain is a soluble IL-1R or a single-domain antibody binding to IL-1R1, IL-1alpha, IL-1beta and/or IL-1RAcP.
[0079] (A38) The polypeptide according to (A37), wherein the antigen binding domain is a soluble IL-1R1, soluble IL-1R2, soluble IL-1RAcP or a single-domain antibody binding to IL-1alpha and/or IL-1beta.
[0080] (A39) The polypeptide according to any of (A23) to (A38), wherein the antibody VH comprises an amino acid sequence of SEQ ID NO: 486 and/or the antibody VL comprises an amino acid sequence of SEQ ID NO: 484 or 485.
[0081] (A40) The polypeptide according to any of (A0) to (A39), wherein the carrying moiety has an FcRn binding region.
[0082] (A41) The polypeptide according to any of (A0) to (A40), wherein the carrying moiety comprises an antibody constant region.
[0083] (A42) The polypeptide according to (A41), wherein the antibody constant region of the carrying moiety and the antigen binding domain are fused via a linker or without a linker.
[0084] (A43) The polypeptide according to (A41), wherein the carrying moiety comprises an antibody heavy chain constant region, wherein the antibody heavy chain constant region and the antigen binding domain are fused via a linker or without a linker.
[0085] (A44) The polypeptide according to (A41), wherein the carrying moiety comprises an antibody light chain constant region, wherein the antibody light chain constant region and the antigen binding domain are fused via a linker or without a linker.
[0086] (A45) The polypeptide according to (A43), wherein in the polypeptide, the N terminus of the antibody heavy chain constant region of the carrying moiety and the C terminus of the antigen binding domain are fused via a linker or without a linker, and the polypeptide further has a protease cleavage sequence, wherein the protease cleavage sequence is located within the sequence of the antigen binding domain, or on the antigen binding domain side compared with amino acid position 122 (EU numbering) of the antibody heavy chain constant region.
[0087] (A46) The polypeptide according to (A44), wherein in the polypeptide, the N terminus of the antibody light chain constant region of the carrying moiety and the C terminus of the antigen binding domain are fused via a linker or without a linker, and the polypeptide further has a protease cleavage sequence, wherein the protease cleavage sequence is located within the sequence of the antigen binding domain, or on the antigen binding domain side compared with amino acid position 113 (EU numbering) (Kabat numbering position 113) of the antibody light chain constant region.
[0088] (A47) The polypeptide according to any of (A42) to (A44), wherein in the polypeptide, the N terminus of the antibody constant region of the carrying moiety and the C terminus of the antigen binding domain are fused via a linker or without a linker, the antigen binding domain is a single-domain antibody prepared from VH, or VHH, and the polypeptide further has a protease cleavage sequence, wherein the protease cleavage sequence is located within the sequence of the antibody constant region, or on the antibody constant region side compared with amino acid position 109 (Kabat numbering) of the single-domain antibody of the antigen binding domain.
[0089] (A48) The polypeptide according to (A42), wherein in the polypeptide, the N terminus of the antibody constant region of the carrying moiety and the C terminus of the antigen binding domain are fused via a linker or without a linker, and the polypeptide further has a protease cleavage sequence, wherein the protease cleavage sequence is located near the boundary between the antigen binding domain and the antibody constant region.
[0090] (A49) The polypeptide according to (A43), wherein in the polypeptide, the N terminus of the antibody heavy chain constant region of the carrying moiety and the C terminus of the antigen binding domain are fused via a linker or without a linker, and the polypeptide further has a protease cleavage sequence, wherein the protease cleavage sequence is located near the boundary between the antigen binding domain and the antibody heavy chain constant region.
[0091] (A50) The polypeptide according to (A44), wherein in the polypeptide, the N terminus of the antibody light chain constant region of the carrying moiety and the C terminus of the antigen binding domain are fused via a linker or without a linker, and the polypeptide further has a protease cleavage sequence, wherein the protease cleavage sequence is located near the boundary between the antigen binding domain and the antibody light chain constant region.
[0092] (A51) The polypeptide according to (A49), wherein the antigen binding domain is a single-domain antibody prepared from VH, or VHH, and the protease cleavage sequence is located at any position between amino acid position 109 (Kabat numbering) of the single-domain antibody of the antigen binding domain and amino acid position 122 (EU numbering) of the antibody heavy chain constant region.
[0093] (A52) The polypeptide according to (A50), wherein the antigen binding domain is a single-domain antibody prepared from VH, or VHH, and the protease cleavage sequence is located at any position between amino acid position 109 (Kabat numbering) of the single-domain antibody of the antigen binding domain and amino acid position 113 (EU numbering) (Kabat numbering position 113) of the antibody light chain constant region.
[0094] (A53) The polypeptide according to (A49), wherein the antigen binding domain is a single-domain antibody prepared from VL, and the protease cleavage sequence is located at any position between amino acid position 104 (Kabat numbering) of the single-domain antibody of the antigen binding domain and amino acid position 122 (EU numbering) of the antibody heavy chain constant region.
[0095] (A54) The polypeptide according to (A50), wherein the antigen binding domain is a single-domain antibody prepared from VL, and the protease cleavage sequence is located at any position between amino acid position 109 (Kabat numbering) of the single-domain antibody of the antigen binding domain and amino acid position 113 (EU numbering) (Kabat numbering position 113) of the antibody light chain constant region.
[0096] (A55) The polypeptide according to any of (A41) to (A54), wherein the antibody constant region of the polypeptide is an IgG antibody constant region.
[0097] (A56) The polypeptide according to any of (A0) to (A55), wherein the polypeptide is an IgG antibody-like molecule.
[0098] (A57) The polypeptide according to any of (A0) to (A56), wherein when the antigen binding domain is assayed in an unreleased state by use of BLI (bio-layer interferometry) (Octet), the binding of the antigen binding domain to the antigen is not seen.
[0099] (A58) The polypeptide according to any of (A0) to (A57), wherein a second antigen binding domain is further linked to the antigen binding domain.
[0100] (A59) The polypeptide according to (A58), wherein the second antigen binding domain has antigen binding specificity different from that of the antigen binding domain.
[0101] (A60) The polypeptide according to (A58) or (A59), wherein the second antigen binding domain comprises a second single-domain antibody.
[0102] (A61) The polypeptide according to (A60), wherein the antigen binding domain is a single-domain antibody, the second antigen binding domain is a second single-domain antibody, and the antigen binding domain and the second antigen binding domain are capable of being released from the polypeptide, wherein the single-domain antibody and the second single-domain antibody form a bispecific antigen binding molecule in released states of the antigen binding domain and the second antigen binding domain.
[0103] (A62) The polypeptide according to any of (A58) to (A61), wherein the second antigen binding domain is directed to HER2 or GPC3 as a target antigen.
[0104] (A63) The polypeptide according to any of (A0) to (A62), wherein the polypeptide further has an additional antigen binding domain different from the antigen binding domain, wherein the antigen binding activity of the additional antigen binding domain is also inhibited by linking to the carrying moiety of the polypeptide.
[0105] (A64) The polypeptide according to (A63), wherein the additional antigen binding domain and the antigen binding domain differ in antigen binding specificity.
[0106] (A65) A pharmaceutical composition comprising the polypeptide of any of (A0) to (A64).

[0107] The present invention further encompasses exemplary embodiments described below.
[0108] (B1) A method for treating a subject having an IL-1R1 mediated disease or disorder comprising administering to the subject an effective amount of the polypeptide of any one of (A1) to (A64).
[0109] (B2) A method for treating a subject having osteoarthritis (OA) comprising administering to the subject an effective amount of the polypeptide of any one of (A1) to (A64).
[0110] (B3) A method for preventing cartilage degradation of a subject in osteoarthritis (OA) comprising administering to the subject an effective amount of the polypeptide of any one of (A1) to (A64).
[0111] (B4) A pharmaceutical composition for treating a subject having an IL-1R1 mediated disease or disorder, comprising an effective amount of the polypeptide of any one of (A1) to (A64).
[0112] (B5) A pharmaceutical composition for treating a subject having osteoarthritis (OA), comprising an effective amount of the polypeptide of any one of (A1) to (A64).
[0113] (B6) A pharmaceutical composition for preventing cartilage degradation of a subject in osteoarthritis (OA), comprising an effective amount of the polypeptide of any one of (A1) to (A64).
[0114] (B7) Use of the polypeptide of any one of (A1) to (A64) in a manufacture of a medicament for treating a subject having an IL-1R1 mediated disease or disorder.
[0115] (B8) Use of the polypeptide of any one of (A1) to (A64) in a manufacture of a medicament for treating a subject having osteoarthritis (OA).
[0116] (B9) Use of the polypeptide of any one of (A1) to (A64) in a manufacture of a medicament for preventing cartilage degradation of a subject in osteoarthritis (OA).
[0117] (B10) A polypeptide of any one of (A1) to (A64) for use in treating a subject having an IL-1R1 mediated disease or disorder.
[0118] (B11) A polypeptide of any one of (A1) to (A64) for use in treating a subject having osteoarthritis (OA).
[0119] (B12) A polypeptide of any one of (A1) to (A64) for use in preventing cartilage degradation of a subject in osteoarthritis (OA).

[0120] The present invention further encompasses exemplary embodiments described below.
[0121] (C1) A method for producing the polypeptide of any of (A1) to (A64).
[0122] (C2) The production method according to (C1), comprising the following steps:
   [0123] (a) obtaining an antigen binding domain binding to one or more antigens involved in IL-1 mediated signal transduction;
   [0124] (b) linking the antigen binding domain obtained in the step (a) to a carrying moiety such that the antigen binding activity of the antigen binding domain is inhibited by an inhibiting domain of the carrying moiety, to form a polypeptide precursor; and
   [0125] (c) introducing a protease cleavage sequence into the polypeptide precursor.
[0126] (C3) The production method according to (C1), comprising the following steps:
   [0127] (a) obtaining an antigen binding domain binding to one or more antigens involved in IL-1 mediated signal transduction;
   [0128] (b) linking the antigen binding domain obtained in the step (a) to a carrying moiety such that the antigen binding activity of the antigen binding domain is inhibited by an inhibiting domain of the carrying moiety, to form a polypeptide precursor; and
   [0129] (c) introducing a protease cleavage sequence to near the boundary between the antigen binding domain and the carrying moiety.
[0130] (C4) The production method according to (C1), comprising the following steps:
   [0131] (a) obtaining an antigen binding domain binding to one or more antigens involved in IL-1 mediated signal transduction; and
   [0132] (b) linking the antigen binding domain obtained in the step (a) to a carrying moiety via a protease cleavage sequence such that the antigen binding activity of the antigen binding domain is inhibited by an inhibiting domain of the carrying moiety, to form a polypeptide.
[0133] (C5) The production method according to any of (C2) to (C4), further comprising the following step:
   [0134] (d) confirming that the binding activity of the antigen binding domain incorporated in the polypeptide or the polypeptide precursor against the target antigen is weakened or lost.
[0135] (C6) The production method according to any of (C2) to (C5), further comprising the following step:
   [0136] (e) releasing the antigen binding domain by cleaving the protease cleavage sequence with a protease and confirming that the released antigen binding domain binds to the antigen.
[0137] (C7) The production method according to (C1), wherein the polypeptide is an IgG antibody-like molecule.
[0138] (C8) The production method according to (C7), comprising the following steps:
   [0139] (a) obtaining an antigen binding domain binding to one or more antigens involved in IL-1 mediated signal transduction;
   [0140] (b) associating the antigen binding domain obtained in the step (a) as a substitute for VH of an IgG antibody or a modified IgG antibody with VL or VH, or associating the antigen binding domain as a substitute for VL of an IgG antibody or a modified IgG antibody with VH or VL such that the antigen binding activity of the antigen binding domain is inhibited, to form an IgG antibody-like molecule precursor harboring the antigen binding domain; and
   [0141] (c) introducing a protease cleavage sequence into the IgG antibody-like molecule precursor harboring the antigen binding domain.
[0142] (C9) The production method according to (C7), comprising the following steps:
   [0143] (a) obtaining an antigen binding domain binding to one or more antigens involved in IL-1 mediated signal transduction;
   [0144] (b) associating the antigen binding domain obtained in the step (a) as a substitute for VH of an IgG antibody or a modified IgG antibody with VL or VH, or associating the antigen binding domain as a substitute for VL of an IgG antibody or a modified IgG antibody with VH or VL such that the antigen binding activity of the antigen binding domain is inhibited, to form an IgG antibody-like molecule precursor harboring the antigen binding domain; and
   [0145] (c) introducing a protease cleavage sequence to near the boundary between the antigen binding domain and an antibody constant region in the IgG antibody-like molecule precursor.
[0146] (C10) The production method according to (C7), comprising the following steps:
   [0147] (a) obtaining an antigen binding domain binding to one or more antigens involved in IL-1 mediated signal transduction; and
   [0148] (b) linking the antigen binding domain obtained in the step (a) as a substitute for IgG antibody VH or VL to an IgG antibody heavy chain constant region or light chain constant region via a protease cleavage sequence such that the antigen binding activity of the antigen binding domain is inhibited, to form an IgG antibody-like molecule harboring the antigen binding domain.
[0149] (C11) The production method according to any of (C8) to (C10), further comprising the following step:
   [0150] (d) confirming that the binding activity of the antigen binding domain introduced in the IgG antibody-like molecule or the IgG antibody-like molecule precursor against the target antigen is weakened or lost.
[0151] (C12) The production method according to any of (C8) to (C11), further comprising the following step:
   [0152] (e) releasing the antigen binding domain by cleaving the protease cleavage sequence with a protease and confirming that the released antigen binding domain binds to the target antigen.
[0153] (C13) The production method according to (C7), comprising the following steps:
   [0154] (a) substituting an amino acid residue in an antigen binding domain that involves in association of the antigen binding domain with antibody VH, or substituting an amino acid residue in an antigen binding domain that involves in association of the antigen binding domain with antibody VL, to prepare an antigen binding domain variant retaining the binding activity of the antigen binding domain against the target antigen;
   [0155] (b) associating the antigen binding domain variant prepared in the step (a) with the antibody VH, or associating the antigen binding domain variant with the antibody VL such that the antigen binding activity of the antigen binding domain variant is inhibited, to form an IgG antibody-like molecule precursor harboring the antigen binding domain variant; and
   [0156] (c) introducing a protease cleavage sequence into the IgG antibody-like molecule precursor harboring the antigen binding domain variant, wherein the antigen biding domain binds to one or more antigens involved in IL-1 mediated signal transduction.
[0157] (C14) The production method according to (C7), comprising the following steps:
   [0158] (a) substituting an amino acid residue in an antigen binding domain that involves in association of the antigen binding domain with antibody VH, or substituting an amino acid residue in an antigen binding domain that involves in association of the antigen binding domain with antibody VL, to prepare an antigen binding domain variant retaining the binding activity of the antigen binding domain against the target antigen;
   [0159] (b) associating the antigen binding domain variant prepared in the step (a) with the antibody VH, or associating the antigen binding domain variant with the antibody VL such that the antigen binding activity of the antigen binding domain variant is inhibited, to form an IgG antibody-like molecule precursor harboring the antigen binding domain variant; and
   [0160] (c) introducing a protease cleavage sequence to near the boundary between the antigen binding domain variant and a constant region in the IgG antibody-like molecule precursor, wherein the antigen biding domain binds to one or more antigens involved in IL-1 mediated signal transduction.
[0161] (C15) The production method according to (C7), comprising the following steps:
   [0162] (a) substituting an amino acid residue in an antigen binding domain that involves in association of the antigen binding domain with antibody VH, or substituting an amino acid residue in an antigen binding domain that involves in association of the antigen binding domain with antibody VL, to prepare an antigen binding domain variant retaining the binding activity of the antigen binding domain against the target antigen; and
   [0163] (b) linking the antigen binding domain variant prepared in the step (a) to an IgG antibody heavy chain constant region via a protease cleavage sequence, or linking the antigen binding domain variant to an IgG antibody light chain constant region via a protease cleavage sequence such that the antigen binding activity of the antigen binding domain variant is inhibited, to form an IgG antibody-like molecule harboring the antigen binding domain variant, wherein the antigen biding domain binds to one or more antigens involved in IL-1 mediated signal transduction.
[0164] (C16) The production method according to any of (C13) to (C15), further comprising the following step:
   [0165] (d) confirming that the binding activity of the antigen binding domain variant harbored in the IgG antibody-like molecule or the binding activity of the antigen binding domain variant harbored in the IgG antibody-like molecule precursor against the target antigen is weakened or lost.
[0166] (C17) The production method according to any of (C13) to (C16), further comprising the following step:
   [0167] (e) releasing the antigen binding domain variant by cleaving the protease cleavage sequence with a protease and confirming that the released antigen binding domain variant binds to the target antigen.
[0168] (C18) The production method according to any of (C2) to (C17), wherein the antigen binding domain binds to an epitope within one or more antigens involved in IL-1 mediated signal transduction.
[0169] (C19) The production method according to any of (C1) to (C18), wherein one or more antigens involved in IL-1 mediated signal transduction is IL-1R1, IL-1alpha, IL-1beta and/or IL-1RAcP.
[0170] (C20) The production method according to any of (C2) to (C18), wherein the antigen binding domain competes for binding the epitope with a single-domain antibody VL selected from the group consisting of 1) and 2) below:
   [0171] 1) a single-domain antibody VL comprising the amino acid sequence of SEQ ID NO: 479, and
   [0172] 2) a single-domain antibody VL comprising the amino acid sequence of SEQ ID NO: 480.
[0173] (C21) The production method according to any of (C2) to (C20), wherein the antigen binding domain comprises a single-domain antibody or an antagonist or is a single-domain antibody or an antagonist.
[0174] (C22) The production method according to (C21), wherein the single-domain antibody is a VL having antigen binding activity by itself.
[0175] (C23) The production method according to (C22), wherein the VL having antigen binding activity by itself comprises the amino acid sequence of SEQ ID NO: 479 or 480.
[0176] (C24) The production method according to any one of (C8) to (C23), wherein the VH of IgG in the step (b) and/or IgG antibody-like molecule precursor in in the step (b) comprises an amino acid sequence of SEQ ID NO: 486.
[0177] (C25) The production method according to any of (C8) to (C23), wherein the VL of IgG in the step (b) and/or IgG antibody-like molecule precursor in in the step (b) comprises an amino acid sequence of SEQ ID NO: 484 or 485.
[0178] (C26) A polynucleotide encoding the polypeptide according to any of (A1) to (A64).
[0179] (C27) A vector comprising the polynucleotide according to (C26).
[0180] (C28) A host cell comprising the polynucleotide according to (C26) or the vector according to (C26).
[0181] (C29) A method for producing the polypeptide of any of (A1) to (A64), comprising the step of culturing the host cell according to (C28).
[0182] (C30) The polypeptide produced by the method according to any of (C1) to (C25) and (C29).

[0183] The present invention further encompasses exemplary embodiments described below.
[0184] (D1) A method for screening for an antigen binding domain whose antigen binding activity can be inhibited by associating with particular VL, associating with particular VH, or associating with particular VHH, wherein the antigen is one or more molecules involved in IL-1 mediated signal transduction.
[0185] (D2) The screening method according to (D1), wherein the method is a method for screening for an antigen binding domain whose antigen binding activity can be inhibited by associating with particular VL.
[0186] (D3) The screening method according to (D2), comprising the following steps:
   [0187] (a) obtaining an antigen binding domain having target antigen binding activity;
   [0188] (b) associating the antigen binding domain obtained in the step (a) with a particular VL; and
   [0189] (c) confirming that the binding activity of the antigen binding domain associated with the particular VL in the step (b) against the antigen is weakened or lost as compared with that before the association.
[0190] (D4) The screening method according to (D2), comprising the following steps:
   [0191] (a) associating an antigen binding domain with a particular VL;
   [0192] (b) selecting an association of the VL and the antigen binding domain on the basis that the antigen binding domain associated with the particular VL in the step (a) has no binding activity or binding activity of a predetermined value or lower against the antigen; and
   [0193] (c) confirming that the antigen binding domain in the associate selected in the step (b) has stronger binding activity against the antigen in a state unassociated with the particular VL than that in a state associated therewith.
[0194] (D5) The screening method according to (D1), wherein the method is a method for screening for an antigen binding domain whose antigen binding activity can be inhibited by associating with particular VH.
[0195] (D6) The screening method according to (D5), comprising the following steps:
   [0196] (a) obtaining an antigen binding domain having target antigen binding activity;
   [0197] (b) associating the antigen binding domain obtained in the step (a) with a particular VH; and
   [0198] (c) confirming that the binding activity of the antigen binding domain associated with the particular VH in the step (b) against the antigen is weakened or lost as compared with that before the association.
[0199] (D7) The screening method according to (D5), comprising the following steps:
   [0200] (a) associating an antigen binding domain with a particular VH;
   [0201] (b) selecting an association of the VH and the antigen binding domain on the basis that the antigen binding domain associated with the particular VH in the step (a) has no binding activity or binding activity of a predetermined value or lower against the antigen; and
   [0202] (c) confirming that the antigen binding domain in the associate selected in the step (b) has stronger binding activity against the antigen in a state unassociated with the particular VH than that in a state associated therewith.
[0203] (D8) The screening method according to (D1), wherein the method is a method for screening for an antigen binding domain whose antigen binding activity can be inhibited by associating with particular VHH.
[0204] (D9) The screening method according to (D8), comprising the following steps:
   [0205] (a) obtaining an antigen binding domain having target antigen binding activity;
   [0206] (b) associating the antigen binding domain obtained in the step (a) with a particular VHH; and
   [0207] (c) confirming that the binding activity of the antigen binding domain associated with the particular VHH in the step (b) against the antigen is weakened or lost as compared with that before the association.
[0208] (D10) The screening method according to (D8), comprising the following steps:
   [0209] (a) associating an antigen binding domain with a particular VHH;
   [0210] (b) selecting an association of the VHH and the antigen binding domain on the basis that the antigen binding domain associated with the particular VHH in the step (a) has no binding activity or binding activity of a predetermined value or lower against the antigen; and
   [0211] (c) confirming that the antigen binding domain in the associate selected in the step (b) has stronger binding activity against the antigen in a state unassociated with the particular VHH than that in a state associated therewith.
[0212] (D11) The screening method according to any of (D1) to (D10), wherein the antigen binding domain comprises a single-domain antibody or an antagonist or is a single-domain antibody or an antagonist.
[0213] (D12) The screening method according to (D11), wherein the single-domain antibody is a VL having antigen binding activity by itself.
[0214] (D13) The screening method according to any of (D1) to (D12), wherein one or more molecules involved in IL-1 mediated signal transduction is selected from the group consisting of IL-1R1, IL-1alpha, IL-1beta and IL-1RAcP.
[0215] (D14) The screening method according to any of (D1) to (D13) for use in obtaining a candidate for
   [0216] (i) treating a subject having an IL-1R1 mediated disease or disorder,
   [0217] (ii) treating a subject having osteoarthritis (OA), and/or
   [0218] (iii) preventing cartilage degradation of a subject in osteoarthritis (OA).

[0219] The present invention further encompasses exemplary embodiments described below.
[0220] (E1) A method for producing an antigen binding domain whose antigen binding activity can be inhibited by associating with particular VL, associating with particular VH, or associating with particular VHH, wherein the antigen is one or more molecules involved in IL-1 mediated signal transduction.
[0221] (E2) The production method according to (E1), wherein the method is a method for producing an antigen binding domain whose antigen binding activity can be inhibited by associating with particular VL.
[0222] (E3) The production method according to (E2), comprising the following step:
   [0223] (a) substituting an amino acid residue in an antigen binding domain that involves in association of the antigen binding domain with antibody VL, to prepare an antigen binding domain variant retaining the binding activity of the antigen binding domain against the target antigen.
[0224] (E4) The production method according to (E3), further comprising the following steps:
   [0225] (b) associating the antigen binding domain variant prepared in the step (a) with the VL; and
   [0226] (c) confirming that the antigen binding activity of the antigen binding domain variant associated with the VL is weakened or lost as compared with that before the association.
[0227] (E5) The production method according to (E1), wherein the method is a method for producing an antigen binding domain whose antigen binding activity can be inhibited by associating with particular VH.
[0228] (E6) The production method according to (E5), comprising the following step:
   [0229] (a) substituting an amino acid residue in an antigen binding domain that involves in association of the antigen binding domain with antibody VH, to prepare an antigen binding domain variant retaining the binding activity of the antigen binding domain against the target antigen.
[0230] (E7) The production method according to (E6), further comprising the following steps:
   [0231] (b) associating the antigen binding domain variant prepared in the step (a) with the VH; and
   [0232] (c) confirming that the antigen binding activity of the antigen binding domain variant associated with the VH is weakened or lost as compared with that before the association.
[0233] (E8) The production method according to (E1), wherein the method is a method for producing an antigen binding domain whose antigen binding activity can be inhibited by associating with particular VHH.
[0234] (E9) The production method according to (E8), comprising the following step:
   [0235] (a) substituting an amino acid residue in an antigen binding domain that involves in association of the antigen binding domain with an VHH, to prepare an antigen binding domain variant retaining the binding activity of the antigen binding domain against the target antigen.
[0236] (E10) The production method according to (E9), further comprising the following steps:
   [0237] (b) associating the antigen binding domain variant prepared in the step (a) with the VHH; and
   [0238] (c) confirming that the antigen binding activity of the antigen binding domain variant associated with the VHH is weakened or lost as compared with that before the association.
[0239] (E11) The production method according to any of (E1) to (E10), wherein the antigen binding domain comprises a single-domain antibody or an antagonist or is a single-domain antibody or an antagonist.
[0240] (E12) The production method according to (E11), wherein the single-domain antibody is a VL having antigen binding activity by itself.
[0241] (E13) The production method according to any of (E1) to (E12), wherein one or more molecules involved in IL-1 mediated signal transduction is selected from the group consisting of IL-1R1, IL-1alpha, IL-1beta and IL-1RAcP.

[0242] The present invention further encompasses exemplary embodiments described below.
[0243] (F1) A library comprising a plurality of fusion polypeptides of antigen binding domains each linked to a first association sustaining domain, wherein the antigen binding domains include an antigen binding domain whose antigen binding activity can be inhibited or could be lost by associating with particular VL, an antigen binding domain whose antigen binding activity can be inhibited or could be lost by associating with particular VH, or an antigen binding domain whose antigen binding activity can be inhibited or could be lost by associating with particular VHH, wherein the antigen is one or more molecules involved in IL-1 mediated signal transduction.
[0244] (F2) The library according to (F1), wherein the antigen binding domain comprises a single-domain antibody or is a single-domain antibody, and the single-domain antibody moieties of the fusion polypeptides in the library include a single-domain antibody obtained from an animal of the family Camelidae or a transgenic animal harboring a gene capable of raising the single-domain antibody, or a humanized antibody thereof, a single-domain antibody obtained by the immunization of an animal of the family Camelidae or a transgenic animal harboring a gene capable of raising the single-domain antibody, or a humanized antibody thereof, or an artificially prepared single-domain antibody originating from human antibody VH or VL.
[0245] (F3) The library according to (F1) or (F2) which is a library comprising a plurality of fusion polypeptides of antigen binding domains each linked to a first association sustaining domain, wherein the antigen binding domains include an antigen binding domain whose antigen binding activity can be inhibited or could be lost by associating with particular VL.
[0246] (F4) The library according to (F1) or (F2) which is a library comprising a plurality of fusion polypeptides of antigen binding domains each linked to a first association sustaining domain, wherein the antigen binding domains include an antigen binding domain whose antigen binding activity can be inhibited or could be lost by associating with particular VH.
[0247] (F5) The library according to (F1) or (F2) which is a library comprising a plurality of fusion polypeptides of antigen binding domains each linked to a first association sustaining domain, wherein the antigen binding domains include an antigen binding domain whose antigen binding activity can be inhibited or could be lost by associating with particular VHH.
[0248] (F6) The library according to any of (F1) to (F5), wherein the first association sustaining domain comprises an IgG antibody CH1 domain or an antibody light chain constant region.
[0249] (F7) The library according to any of (F1) to (F6), wherein the antigen binding domain comprises a single-domain antibody or an antagonist or is a single-domain antibody or an antagonist.
[0250] (F8) The library according to (F7), wherein the single-domain antibody is a VL having antigen binding activity by itself.
[0251] (F9) The library according to any of (F1) to (F8), wherein one or more molecules involved in IL-1 mediated signal transduction is selected from the group consisting of IL-1R1, IL-1alpha, IL-1beta and IL-1RAcP.
[0252] (F10) The library according to any of (F1) to (F9), wherein the VL having antigen binding activity by itself comprises the amino acid sequence of SEQ ID NO: 479 or 480.

[0253] The present invention further encompasses exemplary embodiments described below.
[0254] (G1) A method for screening a library according to (F1) or (F2) for a fusion polypeptide comprising an antigen binding domain whose antigen binding activity can be inhibited or could be lost by associating with particular VL, an antigen binding domain whose antigen binding activity can be inhibited or could be lost by associating with particular VH, or an antigen binding domain whose antigen binding activity can be inhibited or could be lost by associating with particular VHH, wherein the antigen is one or more molecules involved in IL-1 mediated signal transduction.
[0255] (G2) A method for screening a library according to (F3) for a fusion polypeptide comprising an antigen binding domain whose antigen binding activity can be inhibited or could be lost by associating with particular VL, wherein the antigen is one or more molecules involved in IL-1 mediated signal transduction.
[0256] (G3) The screening method according to (G2), comprising the following steps:
   [0257] (a) in vitro displaying the fusion polypeptides of the library;
   [0258] (b) providing an association partner of a second association sustaining domain fused with a particular VL;
   [0259] (c) associating the fusion polypeptides displayed in the step (a) with the association partner provided in the step (b) and selecting a fusion polypeptide that does not bind to the antigen or has antigen binding activity of a predetermined value or lower in a state where the antigen binding domain associates with the VL; and
   [0260] (d) selecting, from the fusion polypeptides thus selected in the step (c), a fusion polypeptide that binds to the antigen or has antigen binding activity of a predetermined value or higher in a state where the antigen binding domain contained therein does not associate with the VL.
[0261] (G4) The screening method according to (G3), wherein the association partner provided in the step (b) further comprises a protease cleavage sequence, and the step (d) comprises cleaving the association partner by protease treatment so that the association of the antigen binding domain with the VL is canceled.
[0262] (G5) The screening method according to (G4), wherein the protease cleavage sequence of the association partner provided in the step (b) is located near the boundary between the particular VL and the second association sustaining domain.
[0263] (G6) The screening method according to (G3), wherein the fusion polypeptides of the library further comprise a protease cleavage sequence, and the step (d) comprises cleaving the fusion polypeptides by protease treatment so that the association of the antigen binding domain with the VL is canceled.
[0264] (G7) The screening method according to (G6), wherein the fusion polypeptide comprises a first association sustaining domain, and the protease cleavage sequence contained in each fusion polypeptide is located near the boundary between the antigen binding domain and the first association sustaining domain.
[0265] (G8) The screening method according to (G3), wherein the step (d) comprises in vitro displaying again the full lengths of the fusion polypeptides selected in the step (c) or their moieties comprising the antigen binding domains.
[0266] (G9) The screening method according to (G3), wherein the step (d) comprises in vitro displaying again the full lengths of the fusion polypeptides selected in the step (c) and selecting a fusion polypeptide that binds to the antigen or has antigen binding activity of a predetermined value or higher in a state associated only with the second association sustaining domain.
[0267] (G10) A method for screening a library according to (F4) for a fusion polypeptide comprising an antigen binding domain whose antigen binding activity can be inhibited or could be lost by associating with particular VH, wherein the antigen is one or more molecules involved in IL-1 mediated signal transduction.
[0268] (G11) The screening method according to (G10), comprising the following steps:
   [0269] (a) in vitro displaying the fusion polypeptides of the library;
   [0270] (b) providing an association partner of a second association sustaining domain fused with a particular VH;
   [0271] (c) associating the fusion polypeptides displayed in the step (a) with the association partner provided in the step (b) and selecting a fusion polypeptide that does not bind to the antigen or has antigen binding activity of a predetermined value or lower in a state where the antigen binding domain associates with the VH; and
   [0272] (d) selecting, from the fusion polypeptides thus selected in the step (c), a fusion polypeptide that binds to the antigen or has antigen binding activity of a predetermined value or higher in a state where the antigen binding domain contained therein does not associate with the VH.
[0273] (G12) The screening method according to (G11), wherein the association partner provided in the step (b) further comprises a protease cleavage sequence, and the step (d) comprises cleaving the association partner by protease treatment so that the association of the antigen binding domain with the VH is canceled.
[0274] (G13) The screening method according to (G12), wherein the protease cleavage sequence of the association partner provided in the step (b) is located near the boundary between the particular VH and the second association sustaining domain.
[0275] (G14) The screening method according to (G11), wherein the fusion polypeptides of the library further comprise a protease cleavage sequence, and the step (d) comprises cleaving the fusion polypeptides by protease treatment so that the association of the antigen binding domain with the VH is canceled.
[0276] (G15) The screening method according to (G14), wherein the fusion polypeptide comprises a first association sustaining domain, and the protease cleavage sequence contained in each fusion polypeptide is located near the boundary between the antigen binding domain and the first association sustaining domain.
[0277] (G16) The screening method according to (G11), wherein the step (d) comprises in vitro displaying again the full lengths of the fusion polypeptides selected in the step (c) or their moieties comprising the antigen binding domains.
[0278] (G17) The screening method according to (G11), wherein the step (d) comprises in vitro displaying again the full lengths of the fusion polypeptides selected in the step (c) and selecting a fusion polypeptide that binds to the antigen or has antigen binding activity of a predetermined value or higher in a state associated only with the second association sustaining domain.
[0279] (G18) A method for screening a library according to (F5) for a fusion polypeptide comprising an antigen binding domain whose antigen binding activity can be inhibited or could be lost by associating with particular VHH, wherein the antigen is one or more molecules involved in IL-1 mediated signal transduction.
[0280] (G19) The screening method according to (G18), comprising the following steps:
   [0281] (a) in vitro displaying the fusion polypeptides of the library;
   [0282] (b) providing an association partner of a second association sustaining domain fused with a particular VHH;
   [0283] (c) associating the fusion polypeptides displayed in the step (a) with the association partner provided in the step (b) and selecting a fusion polypeptide that does not bind to the antigen or has antigen binding activity of a predetermined value or lower in a state where the antigen binding domain associates with the particular VHH; and
   [0284] (d) selecting, from the fusion polypeptides thus selected in the step (c), a fusion polypeptide that binds to the antigen or has antigen binding activity of a predetermined value or higher in a state where the antigen binding domain contained therein does not associate with the VHH.
[0285] (G20) The screening method according to (G19), wherein the association partner provided in the step (b) further comprises a protease cleavage sequence, and the step (d) comprises cleaving the association partner by protease treatment so that the association of the antigen binding domain with the VHH is canceled.
[0286] (G21) The screening method according to (G20), wherein the protease cleavage sequence of the association partner provided in the step (b) is located near the boundary between the particular VHH and the second association sustaining domain.
[0287] (G22) The screening method according to (G19), wherein the fusion polypeptides of the library further comprise a protease cleavage sequence, and the step (d) comprises cleaving the fusion polypeptides by protease treatment so that the association of the antigen binding domain with the VHH is canceled.
[0288] (G23) The screening method according to (G22), wherein the fusion polypeptide comprises a first association sustaining domain, and the protease cleavage sequence contained in each fusion polypeptide is located near the boundary between the antigen binding domain and the first association sustaining domain.
[0289] (G24) The screening method according to (G19), wherein the step (d) comprises in vitro displaying again the full lengths of the fusion polypeptides selected in the step (c) or their moieties comprising the antigen binding domains.
[0290] (G25) The screening method according to (G19), wherein the step (d) comprises in vitro displaying again the full lengths of the fusion polypeptides selected in the step (c) and selecting a fusion polypeptide that binds to the antigen or has antigen binding activity of a predetermined value or higher in a state associated only with the second association sustaining domain.
[0291] (G26) The screening method according to any of (G3) to (G9), (G11) to (G17), and (G19) to (G25), wherein the step of providing an association partner in the step (b) is the step of displaying the association partner and the fusion polypeptides together.
[0292] (G27) The screening method according to any of (G7) to (G9), (G15) to (G17), and (G23) to (G25), wherein the first association sustaining domain comprises an IgG antibody CH1 domain or an antibody light chain constant region.
[0293] (G28) The screening method according to any of (G3) to (G9), (G11) to (G17), and (G19) to (G25), wherein the second association sustaining domain comprises an IgG antibody CH1 domain or an antibody light chain constant region.
[0294] (G29) The screening method according to (G27) or (G28), wherein the first association sustaining domain comprises an IgG antibody CH1 domain, and the second association sustaining domain comprises an antibody light chain constant region.
[0295] (G30) The screening method according to (G27) or (G28), wherein the first association sustaining domain comprises an antibody light chain constant region, and the second association sustaining domain comprises an IgG antibody CH1 domain.
[0296] (G31) The screening method according to (G2), comprising the following steps:
   [0297] (a) in vitro displaying the fusion polypeptides of the library;
   [0298] (b) providing an association partner of a second association sustaining domain fused with a particular VL;
   [0299] (c) selecting a fusion polypeptide comprising an antigen binding domain that binds to the antigen or has antigen binding activity of a predetermined value or higher; and
   [0300] (d) associating the fusion polypeptides thus selected in the step (c) with the association partner provided in the step (b) and selecting a fusion polypeptide that does not bind to the antigen or has antigen binding activity of a predetermined value or lower in a state where the antigen binding domain associates with the VL.
[0301] (G32) The screening method according to (G31), wherein the step (d) comprises in vitro displaying again the fusion polypeptides selected in the step (c).
[0302] (G33) The screening method according to (G31), wherein the step (c) comprises associating the fusion polypeptide only with the second association sustaining domain or confirming the antigen binding of the antigen binding domain contained in the fusion polypeptide associated only with the second association sustaining domain.
[0303] (G34) The screening method according to (G10), comprising the following steps:
   [0304] (a) in vitro displaying the fusion polypeptides of the library;
   [0305] (b) providing an association partner of a second association sustaining domain fused with a particular VH;
   [0306] (c) selecting a fusion polypeptide comprising an antigen binding domain that binds to the antigen or has antigen binding activity of a predetermined value or higher; and
   [0307] (d) associating the fusion polypeptides thus selected in the step (c) with the association partner provided in the step (b) and selecting a fusion polypeptide that does not bind to the antigen or has antigen binding activity of a predetermined value or lower in a state where the antigen binding domain associates with the VH.
[0308] (G35) The screening method according to (G34), wherein the step (d) comprises in vitro displaying again the fusion polypeptides selected in the step (c).
[0309] (G36) The screening method according to (G34), wherein the step (c) comprises associating the fusion polypeptide only with the second association sustaining domain or confirming the antigen binding of the antigen binding domain contained in the fusion polypeptide associated only with the second association sustaining domain.
[0310] (G37) The screening method according to (G18), comprising the following steps:
   [0311] (a) in vitro displaying the fusion polypeptides of the library;
   [0312] (b) providing an association partner of a second association sustaining domain fused with a particular VHH;
   [0313] (c) selecting a fusion polypeptide comprising an antigen binding domain that binds to the antigen or has antigen binding activity of a predetermined value or higher; and
   [0314] (d) associating the fusion polypeptides thus selected in the step (c) with the association partner provided in the step (b) and selecting a fusion polypeptide that does not bind to the antigen or has antigen binding activity of a predetermined value or lower in a state where the antigen binding domain associates with the VHH.
[0315] (G38) The screening method according to (G37), wherein the step (d) comprises in vitro displaying again the fusion polypeptides selected in the step (c).
[0316] (G39) The screening method according to (G37), wherein the step (c) comprises associating the fusion polypeptide only with the second association sustaining domain or confirming the antigen binding of the antigen binding domain contained in the fusion polypeptide associated only with the second association sustaining domain.
[0317] (G40) The screening method according to any of (G31) to (G39), wherein the fusion polypeptide comprises a first association sustaining domain, and the first association sustaining domain comprises an IgG antibody CH1 domain or an antibody light chain constant region.
[0318] (G41) The screening method according to any of (G31) to (G40), wherein the second association sustaining domain comprises an IgG antibody CH1 domain or an antibody light chain constant region.
[0319] (G42) The screening method according to any of (G31) to (G41), wherein the step of associating the fusion polypeptides with the association partner in the step (d) is the step of displaying the association partner and the fusion polypeptides together.
[0320] (G43) The screening method according to any of (G31) to (G42), wherein the fusion polypeptide comprises a first association sustaining domain, and the first association sustaining domain comprises an IgG antibody CH1 domain, and the second association sustaining domain comprises an antibody light chain constant region.
[0321] (G44) The screening method according to any of (G31) to (G42), wherein the fusion polypeptide comprises a first association sustaining domain, and the first association sustaining domain comprises an antibody light chain constant region, and the second association sustaining domain comprises an IgG antibody CH1 domain.
[0322] (G45) The screening method according to any of (G31) to (G44), wherein the antigen binding domain comprises a single-domain antibody or antagonist or is a single-domain antibody or antagonist.
[0323] (G46) The screening method according to (G45), wherein the single-domain antibody is a VL having antigen binding activity by itself.
[0324] (G47) The screening method according to any of (G1) to (G46), wherein one or more molecules involved in IL-1 mediated signal transduction is selected from the group consisting of IL-1R1, IL-1alpha, IL-1beta and IL-1RAcP.

[0325] The present invention further encompasses exemplary embodiments described below.
[0326] (H1) A polypeptide comprising an antigen binding domain VL and a carrying moiety, wherein the antigen binding domain VL has a shorter half-life in blood than that of the carrying moiety that has an inhibiting domain that inhibits the antigen binding activity of the antigen binding domain VL.
[0327] (H2) The polypeptide according to (H1), wherein the antigen binding domain VL comprises a VL having antigen binding activity by itself or is a VL having antigen binding activity by itself.
[0328] (H3) The polypeptide according to (H1) or (H2), wherein the inhibiting domain of the carrying moiety is VHH, antibody VH, or antibody VL.
[0329] (H4) A polypeptide comprising an antigen binding domain VL and a carrying moiety, wherein the antigen binding domain VL has a shorter half-life in blood than that of the carrying moiety that has an inhibiting domain VL that inhibits the antigen binding activity of the antigen binding domain VL.
[0330] (H5) The polypeptide according to (H4), wherein the antigen binding domain VL comprises a VL having antigen binding activity by itself or is a VL having antigen binding activity by itself.
[0331] (H6) The polypeptide according to (H4) or (H5), wherein the inhibiting domain VL is antibody VL.
[0332] (H7) The polypeptide according to any one of (H1) to (H6), wherein the molecular weight of the antigen binding domain VL is smaller than that of the carrying moiety.
[0333] (H8) The polypeptide according to any one of (H1) to (H7), wherein the molecular weight of the antigen binding domain VL is 120 kDa, 100 kDa, 80 kDa, 60 kDa, 40 kDa, 20 kDa or smaller.
[0334] (H9) The polypeptide according to any of (H1) to (H8), wherein the carrying moiety has FcRn binding activity, and the antigen binding domain VL has no FcRn binding activity or has weaker FcRn binding activity than that of the carrying moiety.
[0335] (H10) The polypeptide according to any of (H1) to (H9), wherein the antigen binding domain VL is capable of being released from the polypeptide, and the antigen binding domain VL released from the polypeptide has higher antigen binding activity than that before the release.
[0336] (H11) The polypeptide according to any of (H1) to (H10), wherein the inhibiting domain of the carrying moiety associates with the antigen binding domain VL and thereby inhibits the antigen binding activity of the antigen binding domain VL.
[0337] (H12) The polypeptide according to (H10), wherein the polypeptide comprises a cleavage site, wherein the cleavage site is cleaved so that the antigen binding domain VL becomes capable of being released from the polypeptide.
[0338] (H13) The polypeptide according to (H11), wherein the polypeptide comprises a cleavage site, wherein the cleavage site is cleaved so that the association of the inhibiting domain of the carrying moiety with the antigen binding domain VL is canceled.
[0339] (H14) The polypeptide according to (H12) or (H13), wherein the cleavage site comprises a protease cleavage sequence.
[0340] (H15) The polypeptide according to (H14), wherein the protease is a target tissue specific protease.
[0341] (H16) The polypeptide according to (H15), wherein the target tissue is a cancer tissue or an inflammatory tissue.
[0342] (H17) The polypeptide according to (H14), wherein the protease is at least one protease selected from matriptase, urokinase (uPA), and metalloproteinase.
[0343] (H18) The polypeptide according to (H17), wherein the protease is at least one protease selected from MT-SP1, uPA, MMP1, MMP2, MMP3, MMP7, MMP9, MMP13, MMP14, ADAM17 ADAMTS4, and ADAMTS5.
[0344] (H19) The polypeptide according to (H14), wherein the protease cleavage sequence comprises a sequence selected from SEQ ID NOs: 12, 25, 34, 35, 70 to 73, 75, 76, 91, 178, 193 to 195, and 508 to 510.
[0345] (H20) The polypeptide according to any of (H14) to (H19), wherein a first flexible linker is further attached to one end of the protease cleavage sequence.
[0346] (H21) The polypeptide according to (H20), wherein a second flexible linker is further attached to the other end of the protease cleavage sequence.
[0347] (H22) The polypeptide according to (H20), wherein the first flexible linker is a flexible linker consisting of a glycine-serine polymer.
[0348] (H23) The polypeptide according to (H21), wherein the second flexible linker is a flexible linker consisting of a glycine-serine polymer.
[0349] (H24) The polypeptide according to any of (H1) to (H23), wherein the antigen binding activity of the antigen binding domain VL is inhibited by associating with the VHH, the antibody VH, or the antibody VL.
[0350] (H25) The polypeptide according to any of (H1) to (H24), wherein the carrying moiety has an FcRn binding region.
[0351] (H26) The polypeptide according to any of (H1) to (H25), wherein the carrying moiety comprises an antibody constant region.
[0352] (H27) The polypeptide according to (H26), wherein the antibody constant region of the carrying moiety and the antigen binding domain VL are fused via a linker or without a linker.
[0353] (H28) The polypeptide according to (H26), wherein the carrying moiety comprises an antibody heavy chain constant region, wherein the antibody heavy chain constant region and the antigen binding domain VL are fused via a linker or without a linker.
[0354] (H29) The polypeptide according to (H26), wherein the carrying moiety comprises an antibody light chain constant region, wherein the antibody light chain constant region and the antigen binding domain VL are fused via a linker or without a linker.
[0355] (H30) The polypeptide according to (H28), wherein in the polypeptide, the N terminus of the antibody heavy chain constant region of the carrying moiety and the C terminus of the antigen binding domain VL are fused via a linker or without a linker, and the polypeptide further has a protease cleavage sequence, wherein the protease cleavage sequence is located within the sequence of the antigen binding domain VL, or on the antigen binding domain VL side compared with amino acid position 122 (EU numbering) of the antibody heavy chain constant region.
[0356] (H31) The polypeptide according to (H29), wherein in the polypeptide, the N terminus of the antibody light chain constant region of the carrying moiety and the C terminus of the antigen binding domain VL are fused via a linker or without a linker, and the polypeptide further has a protease cleavage sequence, wherein the protease cleavage sequence is located within the sequence of the antigen binding domain VL, or on the antigen binding domain VL side compared with amino acid position 113 (EU numbering) (Kabat numbering position 113) of the antibody light chain constant region.
[0357] (H32) The polypeptide according to (H27), wherein in the polypeptide, the N terminus of the antibody constant region of the carrying moiety and the C terminus of the antigen binding domain VL are fused via a linker or without a linker, and the polypeptide further has a protease cleavage sequence, wherein the protease cleavage sequence is located near the boundary between the antigen binding domain VL and the antibody constant region.
[0358] (H33) The polypeptide according to (H28), wherein in the polypeptide, the N terminus of the antibody heavy chain constant region of the carrying moiety and the C terminus of the antigen binding domain VL are fused via a linker or without a linker, and the polypeptide further has a protease cleavage sequence, wherein the protease cleavage sequence is located near the boundary between the antigen binding domain VL and the antibody heavy chain constant region.
[0359] (H34) The polypeptide according to (H29), wherein in the polypeptide, the N terminus of the antibody light chain constant region of the carrying moiety and the C terminus of the antigen binding domain VL are fused via a linker or without a linker, and the polypeptide further has a protease cleavage sequence, wherein the protease cleavage sequence is located near the boundary between the antigen binding domain VL and the antibody light chain constant region.
[0360] (H35) The polypeptide according to (H33), wherein the antigen binding domain VL is a single-domain antibody prepared from VL, and the protease cleavage sequence is located at any position between amino acid position 104 (Kabat numbering) of the single-domain antibody of the antigen binding domain VL and amino acid position 122 (EU numbering) of the antibody heavy chain constant region.
[0361] (H36) The polypeptide according to (H34), wherein the antigen binding domain VL is a single-domain antibody prepared from VL, and the protease cleavage sequence is located at any position between amino acid position 109 (Kabat numbering) of the single-domain antibody of the antigen binding domain VL and amino acid position 113 (EU numbering) (Kabat numbering position 113) of the antibody light chain constant region.
[0362] (H37) The polypeptide according to any of (H26) to (H36), wherein the antibody constant region of the polypeptide is an IgG antibody constant region.
[0363] (H38) The polypeptide according to any of (H1) to (H37), wherein the polypeptide is an IgG antibody-like molecule.
[0364] (H39) The polypeptide according to any of (H1) to (H38), wherein when the antigen binding domain VL is assayed in an unreleased state by use of BLI (bio-layer interferometry) (Octet), the binding of the antigen binding domain VL to the antigen is not seen.
[0365] (H40) The polypeptide according to any of (H1) to (H39), wherein a second antigen binding domain is further linked to the antigen binding domain VL.
[0366] (H41) The polypeptide according to (H40), wherein the second antigen binding domain has antigen binding specificity different from that of the antigen binding domain VL.
[0367] (H42) The polypeptide according to (H40) or (H41), wherein the second antigen binding domain comprises a second single-domain antibody.
[0368] (H43) The polypeptide according to (H42), wherein the second antigen binding domain is a second single-domain antibody, and the antigen binding domain VL and the second antigen binding domain are capable of being released from the polypeptide, wherein the antigen binding domain VL and the second single-domain antibody form a bispecific antigen binding molecule in released states of the antigen binding domain VL and the second antigen binding domain.
[0369] (H44) The polypeptide according to any of (H40) to (H43), wherein the second antigen binding domain is directed to HER2 or GPC3 as a target antigen.
[0370] (H45) The polypeptide according to any of (H1) to (H44), wherein the polypeptide further has an additional antigen binding domain different from the antigen binding domain VL, wherein the antigen binding activity of the additional antigen binding domain is also inhibited by linking to the carrying moiety of the polypeptide.
[0371] (H46) The polypeptide according to (H45), wherein the additional antigen binding domain and the antigen binding domain VL differ in antigen binding specificity.
[0372] (H47) The polypeptide according to any of (H1) to (H46), wherein the additional antigen binding domain is an antigen binding domain directed to plexin A1, IL6R or CD3 as a target antigen.
[0373] (H48) A pharmaceutical composition comprising the polypeptide of any of (H1) to (H47).

[0374] The present invention further encompasses exemplary embodiments described below.
[0375] (I1) A method for producing the polypeptide of any of (H1) to (H47).
[0376] (I2) The production method according to (I1), comprising the following steps:
   [0377] (a) obtaining a single-domain antibody binding to a target antigen;
   [0378] (b) linking the single-domain antibody obtained in the step (a) to a carrying moiety such that the antigen binding activity of the single-domain antibody is inhibited by an inhibiting domain of the carrying moiety, to form a polypeptide precursor; and
   [0379] (c) introducing a protease cleavage sequence into the polypeptide precursor,
   [0380] wherein the single-domain antibody is a VL having antigen binding activity by itself.
[0381] (I3) The production method according to (I1), comprising the following steps:
   [0382] (a) obtaining a single-domain antibody binding to a target antigen;
   [0383] (b) linking the single-domain antibody obtained in the step (a) to a carrying moiety such that the antigen binding activity of the single-domain antibody is inhibited by an inhibiting domain of the carrying moiety, to form a polypeptide precursor; and
   [0384] (c) introducing a protease cleavage sequence to near the boundary between the single-domain antibody and the carrying moiety,
   [0385] wherein the single-domain antibody is a VL having antigen binding activity by itself.
[0386] (I4) The production method according to (I1), comprising the following steps:
   [0387] (a) obtaining a single-domain antibody binding to a target antigen; and
   [0388] (b) linking the single-domain antibody obtained in the step (a) to the carrying moiety via a protease cleavage sequence such that the antigen binding activity of the single-domain antibody is inhibited by an inhibiting domain of the carrying moiety, to form a polypeptide,
   [0389] wherein the single-domain antibody is a VL having antigen binding activity by itself.
[0390] (I5) The production method according to any of (I2) to (I4), further comprising the following step:
   [0391] (d) confirming that the binding activity of the single-domain antibody incorporated in the polypeptide or the polypeptide precursor against the target antigen is weakened or lost.
[0392] (I6) The production method according to any of (I2) to (I5), further comprising the following step:
   [0393] (e) releasing the single-domain antibody by cleaving the protease cleavage sequence with a protease and confirming that the released single-domain antibody binds to the antigen.
[0394] (I7) The production method according to (I1), wherein the polypeptide is an IgG antibody-like molecule.
[0395] (I8) The production method according to (I7), comprising the following steps:
   [0396] (a) obtaining a single-domain antibody binding to a target antigen;
   [0397] (b) associating the single-domain antibody obtained in the step (a) as a substitute for VH of an IgG antibody or a modified IgG antibody with VL or VH, or associating the single-domain antibody as a substitute for VL of an IgG antibody or a modified IgG antibody with VH or VL such that the antigen binding activity of the single-domain antibody is inhibited, to form an IgG antibody-like molecule precursor harboring the single-domain antibody; and
   [0398] (c) introducing a protease cleavage sequence into the IgG antibody-like molecule precursor harboring the single-domain antibody,
   [0399] wherein the single-domain antibody is a VL having antigen binding activity by itself.
[0400] (I9) The production method according to (I7), comprising the following steps:
   [0401] (a) obtaining a single-domain antibody binding to a target antigen;
   [0402] (b) associating the single-domain antibody obtained in the step (a) as a substitute for VH of an IgG antibody or a modified IgG antibody with VL or VH, or associating the single-domain antibody as a substitute for VL of an IgG antibody or a modified IgG antibody with VH or VL such that the antigen binding activity of the single-domain antibody is inhibited, to form an IgG antibody-like molecule precursor harboring the single-domain antibody; and
   [0403] (c) introducing a protease cleavage sequence to near the boundary between the single-domain antibody and an antibody constant region in the IgG antibody-like molecule precursor,
   [0404] wherein the single-domain antibody is a VL having antigen binding activity by itself.
[0405] (I10) The production method according to (I7), comprising the following steps:
   [0406] (a) obtaining a single-domain antibody binding to a target antigen; and
   [0407] (b) linking the single-domain antibody obtained in the step (a) as a substitute for IgG antibody VH or VL to an IgG antibody heavy chain constant region or light chain constant region via a protease cleavage sequence such that the antigen binding activity of the single-domain antibody is inhibited, to form an IgG antibody-like molecule harboring the single-domain antibody,
   [0408] wherein the single-domain antibody is a VL having antigen binding activity by itself.
[0409] (I11) The production method according to any of (I8) to (I10), further comprising the following step:
   [0410] (d) confirming that the binding activity of the single-domain antibody introduced in the IgG antibody-like molecule or the IgG antibody-like molecule precursor against the target antigen is weakened or lost.
[0411] (I12) The production method according to any of (I8) to (I11), further comprising the following step:
   [0412] (e) releasing the single-domain antibody by cleaving the protease cleavage sequence with a protease and confirming that the released single-domain antibody binds to the target antigen.
[0413] (I13) The production method according to (I7), comprising the following steps:
   [0414] (a) substituting an amino acid residue in a single-domain antibody that involves in association of the single-domain antibody with antibody VH, or substituting an amino acid residue in a single-domain antibody that involves in association of the single-domain antibody with antibody VL, to prepare a single-domain antibody variant retaining the binding activity of the single-domain antibody against the target antigen;
   [0415] (b) associating the single-domain antibody variant prepared in the step (a) with the antibody VH, or associating the single-domain antibody variant with the antibody VL such that the antigen binding activity of the single-domain antibody variant is inhibited, to form an IgG antibody-like molecule precursor harboring the single-domain antibody variant; and
   [0416] (c) introducing a protease cleavage sequence into the IgG antibody-like molecule precursor harboring the single-domain antibody variant,
   [0417] wherein the single-domain antibody is a VL having antigen binding activity by itself.
[0418] (I14) The production method according to (I7), comprising the following steps:
   [0419] (a) substituting an amino acid residue in a single-domain antibody that involves in association of the single-domain antibody with antibody VH, or substituting an amino acid residue in a single-domain antibody that involves in association of the single-domain antibody with antibody VL, to prepare a single-domain antibody variant retaining the binding activity of the single-domain antibody against the target antigen;
   [0420] (b) associating the single-domain antibody variant prepared in the step (a) with the antibody VH, or associating the single-domain antibody variant with the antibody VL such that the antigen binding activity of the single-domain antibody variant is inhibited, to form an IgG antibody-like molecule precursor harboring the single-domain antibody variant; and
   [0421] (c) introducing a protease cleavage sequence to near the boundary between the single-domain antibody variant and a constant region in the IgG antibody-like molecule precursor,
   [0422] wherein the single-domain antibody is a VL having antigen binding activity by itself.
[0423] (I15) The production method according to (I7), comprising the following steps:
   [0424] (a) substituting an amino acid residue in a single-domain antibody that involves in association of the single-domain antibody with antibody VH, or substituting an amino acid residue in a single-domain antibody that involves in association of the single-domain antibody with antibody VL, to prepare a single-domain antibody variant retaining the binding activity of the single-domain antibody against the target antigen; and
   [0425] (b) linking the single-domain antibody variant prepared in the step (a) to an IgG antibody heavy chain constant region via a protease cleavage sequence, or linking the single-domain antibody variant to an IgG antibody light chain constant region via a protease cleavage sequence such that the antigen binding activity of the single-domain antibody variant is inhibited, to form an IgG antibody-like molecule harboring the single-domain antibody variant,
   [0426] wherein the single-domain antibody is a VL having antigen binding activity by itself.
[0427] (I16) The production method according to any of (I13) to (I15), further comprising the following step:
   [0428] (d) confirming that the binding activity of the single-domain antibody variant harbored in the IgG antibody-like molecule or the IgG antibody-like molecule precursor against the target antigen is weakened or lost.
[0429] (I17) The production method according to any of (I13) to (I16), further comprising the following step:
   [0430] (e) releasing the single-domain antibody variant by cleaving the protease cleavage sequence with a protease and confirming that the released single-domain antibody variant binds to the target antigen.
[0431] (I18) A polynucleotide encoding the polypeptide according to any of (H1) to (H47).
[0432] (I19) A vector comprising the polynucleotide according to (I18).
[0433] (I20) A host cell comprising the polynucleotide according to (I18) or the vector according to (I19).
[0434] (21) A method for producing the polypeptide of any of (H1) to (H47), comprising the step of culturing the host cell according to (I20).
[0435] (I22) The polypeptide produced by the method according to any of (I1) to (I17) and (I21).

[0436] The present invention further encompasses exemplary embodiments described below.
[0437] (J1) A method for screening for a single-domain antibody whose antigen binding activity can be inhibited by associating with particular VL, associating with particular VH, or associating with particular VHH, wherein the single-domain antibody is a VL having antigen binding activity by itself.
[0438] (J2) The screening method according to (J1), wherein the method is a method for screening for a single-domain antibody whose antigen binding activity can be inhibited by associating with particular VL.
[0439] (J3) The screening method according to (J2), comprising the following steps:
   [0440] (a) obtaining a single-domain antibody having target antigen binding activity;
   [0441] (b) associating the single-domain antibody obtained in the step (a) with a particular VL; and
   [0442] (c) confirming that the binding activity of the single-domain antibody associated with the particular VL in the step (b) against the antigen is weakened or lost as compared with that before the association.
[0443] (J4) The screening method according to (J2), comprising the following steps:
   [0444] (a) associating a single-domain antibody with a particular VL;
   [0445] (b) selecting an association of the VL and the single-domain antibody on the basis that the single-domain antibody associated with the particular VL in the step (a) has no binding activity or binding activity of a predetermined value or lower against the antigen; and
   [0446] (c) confirming that the single-domain antibody in the associate selected in the step (b) has stronger binding activity against the antigen in a state unassociated with the particular VL than that in a state associated therewith.
[0447] (J5) The screening method according to (J1), wherein the method is a method for screening for a single-domain antibody whose antigen binding activity can be inhibited by associating with particular VH.
[0448] (J6) The screening method according to (J5), comprising the following steps:
   [0449] (a) obtaining a single-domain antibody having target antigen binding activity;
   [0450] (b) associating the single-domain antibody obtained in the step (a) with a particular VH; and
   [0451] (c) confirming that the binding activity of the single-domain antibody associated with the particular VH in the step (b) against the antigen is weakened or lost as compared with that before the association.
[0452] (J7) The screening method according to (J5), comprising the following steps:
   [0453] (a) associating a single-domain antibody with a particular VH;
   [0454] (b) selecting an association of the VH and the single-domain antibody on the basis that the single-domain antibody associated with the particular VH in the step (a) has no binding activity or binding activity of a predetermined value or lower against the antigen; and
   [0455] (c) confirming that the single-domain antibody in the associate selected in the step (b) has stronger binding activity against the antigen in a state unassociated with the particular VH than that in a state associated therewith.
[0456] (J8) The screening method according to (J1), wherein the method is a method for screening for a single-domain antibody whose antigen binding activity can be inhibited by associating with particular VHH.
[0457] (J9) The screening method according to (J8), comprising the following steps:
   [0458] (a) obtaining a single-domain antibody having target antigen binding activity;
   [0459] (b) associating the single-domain antibody obtained in the step (a) with a particular VHH; and
   [0460] (c) confirming that the binding activity of the single-domain antibody associated with the particular VHH in the step (b) against the antigen is weakened or lost as compared with that before the association.
[0461] (J10) The screening method according to (J8), comprising the following steps:
   [0462] (a) associating a single-domain antibody with a particular VHH;
   [0463] (b) selecting an association of the VHH and the single-domain antibody on the basis that the single-domain antibody associated with the particular VHH in the step (a) has no binding activity or binding activity of a predetermined value or lower against the antigen; and
   [0464] (c) confirming that the single-domain antibody in the associate selected in the step (b) has stronger binding activity against the antigen in a state unassociated with the particular VHH than that in a state associated therewith.

[0465] The present invention further encompasses exemplary embodiments described below.
[0466] (K1) A method for producing a single-domain antibody whose antigen binding activity can be inhibited by associating with particular VL, associating with particular VH, or associating with particular VHH, wherein the single-domain antibody is a VL having antigen binding activity by itself.
[0467] (K2) The production method according to (K1), wherein the method is a method for producing a single-domain antibody whose antigen binding activity can be inhibited by associating with particular VL.
[0468] (K3) The production method according to (K2), comprising the following step:
   [0469] (a) substituting an amino acid residue in a single-domain antibody that involves in association of the single-domain antibody with antibody VL, to prepare a single-domain antibody variant retaining the binding activity of the single-domain antibody against the target antigen.
[0470] (K4) The production method according to (K3), further comprising the following steps:
   [0471] (b) associating the single-domain antibody variant prepared in the step (a) with the VL; and
   [0472] (c) confirming that the antigen binding activity of the single-domain antibody variant associated with the VL is weakened or lost as compared with that before the association.
[0473] (K5) The production method according to (K1), wherein the method is a method for producing a single-domain antibody whose antigen binding activity can be inhibited by associating with particular VH.
[0474] (K6) The production method according to (K5), comprising the following step:
   [0475] (a) substituting an amino acid residue in a single-domain antibody that involves in association of the single-domain antibody with antibody VH, to prepare a single-domain antibody variant retaining the binding activity of the single-domain antibody against the target antigen.
[0476] (K7) The production method according to (K6), further comprising the following steps:
   [0477] (b) associating the single-domain antibody variant prepared in the step (a) with the VH; and
   [0478] (c) confirming that the antigen binding activity of the single-domain antibody variant associated with the VH is weakened or lost as compared with that before the association.
[0479] (K8) The production method according to (K1), wherein the method is a method for producing a single-domain antibody whose antigen binding activity can be inhibited by associating with particular VHH.
[0480] (K9) The production method according to (K8), comprising the following step:
   [0481] (a) substituting an amino acid residue in a single-domain antibody that involves in association of the single-domain antibody with the VHH, to prepare a single-domain antibody variant retaining the binding activity of the single-domain antibody against the target antigen.
[0482] (K10) The production method according to (K9), further comprising the following steps:
   [0483] (b) associating the single-domain antibody variant prepared in the step (a) with the VHH; and
   [0484] (c) confirming that the antigen binding activity of the single-domain antibody variant associated with the VHH is weakened or lost as compared with that before the association.

[0485] The present invention further encompasses exemplary embodiments described below.
[0486] (L1) A library comprising a plurality of fusion polypeptides of single-domain antibodies each linked to a first association sustaining domain, wherein the single-domain antibodies include a single-domain antibody whose antigen binding activity can be inhibited or could be lost by associating with particular VL, a single-domain antibody whose antigen binding activity is inhibited or could be lost by associating with particular VH, or a single-domain antibody whose antigen binding activity can be inhibited or could be lost by associating with particular VHH, wherein the single-domain antibody is a VL having antigen binding activity by itself.
[0487] (L2) The library according to (L1), wherein the single-domain antibody moieties of the fusion polypeptides in the library include a single-domain antibody obtained from an animal of the family Camelidae or a transgenic animal harboring a gene capable of raising the single-domain antibody, or a humanized antibody thereof, a single-domain antibody obtained by the immunization of an animal of the family Camelidae or a transgenic animal harboring a gene capable of raising the single-domain antibody, or a humanized antibody thereof, or an artificially prepared single-domain antibody originating from human antibody VH or VL.
[0488] (L3) The library according to (L1) or (L2) which is a library comprising a plurality of fusion polypeptides of single-domain antibodies each linked to a first association sustaining domain, wherein the single-domain antibodies include a single-domain antibody whose antigen binding activity can be inhibited or could be lost by associating with particular VL.
[0489] (L4) The library according to (L1) or (L2) which is a library comprising a plurality of fusion polypeptides of single-domain antibodies each linked to a first association sustaining domain, wherein the single-domain antibodies include a single-domain antibody whose antigen binding activity can be inhibited or could be lost by associating with particular VH.
[0490] (L5) The library according to (L1) or (L2) which is a library comprising a plurality of fusion polypeptides of single-domain antibodies each linked to a first association sustaining domain, wherein the single-domain antibodies include a single-domain antibody whose antigen binding activity can be inhibited or could be lost by associating with particular VHH.
[0491] (L6) The library according to any of (L1) to (L5), wherein the first association sustaining domain comprises an IgG antibody CH1 domain or an antibody light chain constant region.

[0492] The present invention further encompasses exemplary embodiments described below.
[0493] (M1) A method for screening a library according to (L1) or (L2) for a fusion polypeptide comprising a single-domain antibody whose antigen binding activity can be inhibited or could be lost by associating with particular VL, a single-domain antibody whose antigen binding activity can be inhibited or could be lost by associating with particular VH, or a single-domain antibody whose antigen binding activity can be inhibited or could be lost by associating with particular VHH, wherein the single-domain antibody is a VL having antigen binding activity by itself.
[0494] (M2) A method for screening a library according to (L3) for a fusion polypeptide comprising a single-domain antibody whose antigen binding activity can be inhibited or could be lost by associating with particular VL, wherein the single-domain antibody is a VL having antigen binding activity by itself.
[0495] (M3) The screening method according to (M2), comprising the following steps:
   [0496] (a) in vitro displaying the fusion polypeptides of the library;
   [0497] (b) providing an association partner of a second association sustaining domain fused with a particular VL;
   [0498] (c) associating the fusion polypeptides displayed in the step (a) with the association partner provided in the step (b) and selecting a fusion polypeptide that does not bind to the antigen or has antigen binding activity of a predetermined value or lower in a state where the single-domain antibody associates with the VL; and
   [0499] (d) selecting, from the fusion polypeptides thus selected in the step (c), a fusion polypeptide that binds to the antigen or has antigen binding activity of a predetermined value or higher in a state where the single-domain antibody contained therein does not associate with the VL.
[0500] (M4) The screening method according to (M3), wherein the association partner provided in the step (b) further comprises a protease cleavage sequence, and the step (d) comprises cleaving the association partner by protease treatment so that the association of the single-domain antibody with the VL is canceled.
[0501] (M5) The screening method according to (M4), wherein the protease cleavage sequence of the association partner provided in the step (b) is located near the boundary between the particular VL and the second association sustaining domain.
[0502] (M6) The screening method according to (M3), wherein the fusion polypeptides of the library further comprise a protease cleavage sequence, and the step (d) comprises cleaving the fusion polypeptides by protease treatment so that the association of the single-domain antibody with the VL is canceled.
[0503] (M7) The screening method according to (M6), wherein the fusion polypeptide comprises a first association sustaining domain, and the protease cleavage sequence contained in each fusion polypeptide is located near the boundary between the single-domain antibody and the first association sustaining domain.
[0504] (M8) The screening method according to (M3), wherein the step (d) comprises in vitro displaying again the full lengths of the fusion polypeptides selected in the step (c) or their moieties comprising the single-domain antibodies.
[0505] (M9) The screening method according to (M3), wherein the step (d) comprises in vitro displaying again the full lengths of the fusion polypeptides selected in the step (c) and selecting a fusion polypeptide that binds to the antigen or has antigen binding activity of a predetermined value or higher in a state associated only with the second association sustaining domain.
[0506] (M10) A method for screening a library according to (L4) for a fusion polypeptide comprising a single-domain antibody whose antigen binding activity can be inhibited or could be lost by associating with particular VH, wherein the single-domain antibody is a VL having antigen binding activity by itself.
[0507] (M11) The screening method according to (M10), comprising the following steps:
   [0508] (a) in vitro displaying the fusion polypeptides of the library;
   [0509] (b) providing an association partner of a second association sustaining domain fused with a particular VH;
   [0510] (c) associating the fusion polypeptides displayed in the step (a) with the association partner provided in the step (b) and selecting a fusion polypeptide that does not bind to the antigen or has antigen binding activity of a predetermined value or lower in a state where the single-domain antibody associates with the VH; and
   [0511] (d) selecting, from the fusion polypeptides thus selected in the step (c), a fusion polypeptide that binds to the antigen or has antigen binding activity of a predetermined value or higher in a state where the single-domain antibody contained therein does not associate with the VH.
[0512] (M12) The screening method according to (M11), wherein the association partner provided in the step (b) further comprises a protease cleavage sequence, and the step (d) comprises cleaving the association partner by protease treatment so that the association of the single-domain antibody with the VH is canceled.
[0513] (M13) The screening method according to (M12), wherein the protease cleavage sequence of the association partner provided in the step (b) is located near the boundary between the particular VH and the second association sustaining domain.
[0514] (M14) The screening method according to (M11), wherein the fusion polypeptides of the library further comprise a protease cleavage sequence, and the step (d) comprises cleaving the fusion polypeptides by protease treatment so that the association of the single-domain antibody with the VH is canceled.
[0515] (M15) The screening method according to (M14), wherein the fusion polypeptide comprises a first association sustaining domain, and the protease cleavage sequence contained in each fusion polypeptide is located near the boundary between the single-domain antibody and the first association sustaining domain.
[0516] (M16) The screening method according to (M11), wherein the step (d) comprises in vitro displaying again the full lengths of the fusion polypeptides selected in the step (c) or their moieties comprising the single-domain antibodies.
[0517] (M17) The screening method according to (M11), wherein the step (d) comprises in vitro displaying again the full lengths of the fusion polypeptides selected in the step (c) and selecting a fusion polypeptide that binds to the antigen or has antigen binding activity of a predetermined value or higher in a state associated only with the second association sustaining domain.
[0518] (M18) A method for screening a library according to (L5) for a fusion polypeptide comprising a single-domain antibody whose antigen binding activity can be inhibited or could be lost by associating with particular VHH, wherein the single-domain antibody is a VL having antigen binding activity by itself.
[0519] (M19) The screening method according to (M18), comprising the following steps:
   [0520] (a) in vitro displaying the fusion polypeptides of the library;
   [0521] (b) providing an association partner of a second association sustaining domain fused with a particular VHH;
   [0522] (c) associating the fusion polypeptides displayed in the step (a) with the association partner provided in the step (b) and selecting a fusion polypeptide that does not bind to the antigen or has antigen binding activity of a predetermined value or lower in a state where the single-domain antibody associates with the particular VHH; and
   [0523] (d) selecting, from the fusion polypeptides thus selected in the step (c), a fusion polypeptide that binds to the antigen or has antigen binding activity of a predetermined value or higher in a state where the single-domain antibody contained therein does not associate with the VHH.
[0524] (M20) The screening method according to (M19), wherein the association partner provided in the step (b) further comprises a protease cleavage sequence, and the step (d) comprises cleaving the association partner by protease treatment so that the association of the single-domain antibody with the VHH is canceled.
[0525] (M21) The screening method according to (M20), wherein the protease cleavage sequence of the association partner provided in the step (b) is located near the boundary between the particular VHH and the second association sustaining domain.
[0526] (M22) The screening method according to (M19), wherein the fusion polypeptides of the library further comprise a protease cleavage sequence, and the step (d) comprises cleaving the fusion polypeptides by protease treatment so that the association of the single-domain antibody with the VHH is canceled.
[0527] (M23) The screening method according to (M22), wherein the fusion polypeptide comprises a first association sustaining domain, and the protease cleavage sequence contained in each fusion polypeptide is located near the boundary between the single-domain antibody and the first association sustaining domain.
[0528] (M24) The screening method according to (M19), wherein the step (d) comprises in vitro displaying again the full lengths of the fusion polypeptides selected in the step (c) or their moieties comprising the single-domain antibodies.
[0529] (M25) The screening method according to (M19), wherein the step (d) comprises in vitro displaying again the full lengths of the fusion polypeptides selected in the step (c) and selecting a fusion polypeptide that binds to the antigen or has antigen binding activity of a predetermined value or higher in a state associated only with the second association sustaining domain.
[0530] (M26) The screening method according to any of (M3) to (M9), (M11) to (M17), and (M19) to (M25), wherein the step of providing an association partner in the step (b) is the step of displaying the association partner and the fusion polypeptides together.
[0531] (M27) The screening method according to any of (M7) to (M9), (M15) to (M17), and (M23) to (M25), wherein the first association sustaining domain comprises an IgG antibody CH1 domain or an antibody light chain constant region.
[0532] (M28) The screening method according to any of (M3) to (M9), (M11) to (M17), and (M19) to (M25), wherein the second association sustaining domain comprises an IgG antibody CH1 domain or an antibody light chain constant region.
[0533] (M29) The screening method according to (M27) or (M28), wherein the first association sustaining domain comprises an IgG antibody CH1 domain, and the second association sustaining domain comprises an antibody light chain constant region.
[0534] (M30) The screening method according to (M27) or (M28), wherein the first association sustaining domain comprises an antibody light chain constant region, and the second association sustaining domain comprises an IgG antibody CH1 domain.
[0535] (M31) The screening method according to (M2), comprising the following steps:
   [0536] (a) in vitro displaying the fusion polypeptides of the library;
   [0537] (b) providing an association partner of a second association sustaining domain fused with a particular VL;
   [0538] (c) selecting a fusion polypeptide comprising a single-domain antibody that binds to the antigen or has antigen binding activity of a predetermined value or higher; and
   [0539] (d) associating the fusion polypeptides thus selected in the step (c) with the association partner provided in the step (b) and selecting a fusion polypeptide that does not bind to the antigen or has antigen binding activity of a predetermined value or lower in a state where the single-domain antibody associates with the VL.
[0540] (M32) The screening method according to (M26), wherein the step (d) comprises in vitro displaying again the fusion polypeptides selected in the step (c).
[0541] (M33) The screening method according to (M31), wherein the step (c) comprises associating the fusion polypeptide only with the second association sustaining domain or confirming the antigen binding of the single-domain antibody contained in the fusion polypeptide associated only with the second association sustaining domain.
[0542] (M34) The screening method according to (M10), comprising the following steps:
   [0543] (a) in vitro displaying the fusion polypeptides of the library;
   [0544] (b) providing an association partner of a second association sustaining domain fused with a particular VH;
   [0545] (c) selecting a fusion polypeptide comprising a single-domain antibody that binds to the antigen or has antigen binding activity of a predetermined value or higher; and
   [0546] (d) associating the fusion polypeptides thus selected in the step (c) with the association partner provided in the step (b) and selecting a fusion polypeptide that does not bind to the antigen or has antigen binding activity of a predetermined value or lower in a state where the single-domain antibody associates with the VH.
[0547] (M35) The screening method according to (M34), wherein the step (d) comprises in vitro displaying again the fusion polypeptides selected in the step (c).
[0548] (M36) The screening method according to (M34), wherein the step (c) comprises associating the fusion polypeptide only with the second association sustaining domain or confirming the antigen binding of the single-domain antibody contained in the fusion polypeptide associated only with the second association sustaining domain.
[0549] (M37) The screening method according to (M18), comprising the following steps:
   [0550] (a) in vitro displaying the fusion polypeptides of the library;
   [0551] (b) providing an association partner of a second association sustaining domain fused with a particular VHH;
   [0552] (c) selecting a fusion polypeptide comprising a single-domain antibody that binds to the antigen or has antigen binding activity of a predetermined value or higher; and
   [0553] (d) associating the fusion polypeptides thus selected in the step (c) with the association partner provided in the step (b) and selecting a fusion polypeptide that does not bind to the antigen or has antigen binding activity of a predetermined value or lower in a state where the single-domain antibody associates with the VHH.
[0554] (M38) The screening method according to (M37), wherein the step (d) comprises in vitro displaying again the fusion polypeptides selected in the step (c).
[0555] (M39) The screening method according to (M37), wherein the step (c) comprises associating the fusion polypeptide only with the second association sustaining domain or confirming the antigen binding of the single-domain antibody contained in the fusion polypeptide associated only with the second association sustaining domain.
[0556] (M40) The screening method according to any of (M31) to (M39), wherein the step of associating the fusion polypeptides with the association partner in the step (d) is the step of displaying the association partner and the fusion polypeptides together.
[0557] (M41) The screening method according to any of (M31) to (M40), wherein the fusion polypeptide comprises a first association sustaining domain, and the first association sustaining domain comprises an IgG antibody CH1 domain or an antibody light chain constant region.
[0558] (M42) The screening method according to any of (M31) to (G41), wherein the second association sustaining domain comprises an IgG antibody CH1 domain or an antibody light chain constant region.
[0559] (M43) The screening method according to (M41) or (M42), wherein the first association sustaining domain comprises an IgG antibody CH1 domain, and the second association sustaining domain comprises an antibody light chain constant region.
[0560] (M44) The screening method according to (M41) or (M42), wherein the first association sustaining domain comprises an antibody light chain constant region, and the second association sustaining domain comprises an IgG antibody CH1 domain.

[0561] The present invention relates to a polypeptide comprising an antigen biding domain and a carrying moiety. In the polypeptide of the present invention, the carrying moiety has an inhibiting domain that inhibits an antigen binding activity of the antigen biding domain. In one embodiment, the antigen biding domain has a shorter half-life in blood than the half-life of the carrying moiety.

[0562] In one embodiment, the antigen biding domain of the present invention may bind to or recognize one or more proteins present in cartilage. Alternatively, the antigen biding domain of the present invention may bind to or recognize one or more molecules involved in IL-1 mediated signal transduction. In the present application, IL-1 mediated signal transduction introduction includes, but are not limited to, the signal transduction involved in IL-1R1, IL-1alpha, IL-1beta and/or IL-1RAcP (interleukin-1 Receptor Accessory Protein). Accordingly, the antigen biding domain of the present invention may bind to or recognize one or more proteins selected from the group consisting of IL-1R1, IL-1alpha, IL-1beta and IL-1RAcP (interleukin-1 Receptor Accessory Protein).

[0563] The polypeptide comprising the above antigen binding domain is useful in treating and/or preventing a disease or disorder in which the above protein(s) is involved in. Specifically, the polypeptide of the present invention is useful in treating and/or preventing an IL-1R1 mediated disease or disorder. Examples of such a disease or disorder include, but are not limited to, osteoarthritis (OA) and cartilage degradation in osteoarthritis (OA). Further, following diseases or disorders are also exemplified as an IL-1R1 mediated disease or disorder: Acne, Acute coronary syndrome, Adult-onset Still's disease, Allergy, Alzheimer's disease, Anaemia, Aneurysm, Gauty arthritis, Juvenile arthritis, Osteo arthritis, Rheumatoid arthritis, Arthritis, Asthma, Atherosclerosis, Autoimmune disease, Behcet's disease, Cachexia, Leukaemia, Solid cancer, Lung cancer, Billiary cancer, Colorectal cancer, Lymphoma, Myeloma, Ceuroendocrine carcinoma, Ovarian cancer, Castleman's disease, Chronic obstructive pulmonary disease, Conjunctivitis, Dermatomyositis, “Type 1 diabetes, Type 1”, Type 2 diabetes, “Diabetes, undisclosed Type”, Familial cold autoinflammatory syndrome, Familial Mediterranean fever, Graft-versus-host disease, Cerebral haemorrhage, Heart failure, Hidradenitis suppurativa, Hypercholesterolaemia, Hyper-IgD syndrome, Hyperuricaemia, Immunological disease, Myocardial infarction, Burkholderia pseudomallei infection, Kawasaki disease, Vascular inflammation, Inflammatory bowel disease, Inflammatory disease, Intermittent claudication, Cerebral ischaemia, Age-related macular degeneration, Muckle-Wells syndrome, Mucositis, Multiple sclerosis, Myelodysplastic syndrome, Myelofibrosis, Neonatal onset multisystem inflammatory disease, “Nephropathy, diabetic”, Musculoskeletal pain, Neuropathic pain, Peripheral vascular disease, Polymyalgia rheumatic, Polymyositis, Psoriasis, Pyoderma gangrenosum, Reperfusion injury, Restenosis, Rosacea, Sarcoidosis, Schnitzler syndrome, Scleritis, Sepsis, Skin disorder, Spinal disc herniation, Thrombophlebitis, Thrombosis, TNF receptor associated periodic syndrome, Traumatic brain injury, Diabetic ulcer, Uveitis, Vestibular disorder and Xerophthalmia.

[0564] A polypeptide of the present invention is partially cleaved by a protease that is expressed in a disease tissue-specific manner. An antigen binding domain is released from the polypeptide by this cleavage. Such released antigen binding domain can penetrate to a deep part of a disease tissue due to the small molecular weight of the domain. Thus, the polypeptide of the present invention can target an antigen present in a deep part of a disease tissue.

[0565] In particular, chondrocytes are fully surrounded by cartilage matrix. In order to deliver sufficient amount of drug molecules to cartilage tissue and chondrocytes, the property of drug molecules needs to be carefully designed. It is known that molecular size affects its penetration ability into articular cartilage. As for the effect of molecular size, it is known that the scFv molecule (ESBA105) penetrates into deeper zone of cartilage than IgG (infliximab) even though they have the same variable region (Ann Rheum Dis. 2010 February; 69(2):443-9, Nat Rev Rheumatol. 2017 March; 13(3):183-193). It is considered that the antigen binding domain comprised in the polypeptide of the present invention can sufficiently penetrate into cartilage tissue and chondrocytes. Accordingly, the polypeptide of the present invention is useful in treating and/or preventing a disease or disorder in a bone tissue including osteoarthritis.

[0566] The polypeptide according to the present invention usually refers to a peptide having a length on the order of 4 amino acids or longer, and a protein. Also, the polypeptide according to the present invention is usually a polypeptide consisting of an artificially designed sequence, but is not limited thereto. For example, an organism-derived polypeptide may be used. Alternatively, the polypeptide according to the present invention may be any of a natural polypeptide, a synthetic polypeptide, a recombinant polypeptide, and the like. Furthermore, fragments of these polypeptides are also included in the polypeptide of the present invention.

[0567] In the present specification, each amino acid is indicated by one-letter code or three-letter code, or both, as represented by, for example, Ala/A, Leu/L, Arg/R, Lys/K, Asn/N, Met/M, Asp/D, Phe/F, Cys/C, Pro/P, Gln/Q, Ser/S, Glu/E, Thr/T, Gly/G, Trp/W, His/H, Tyr/Y, Ile/I, or Val/V. For expressing an amino acid located at a particular position, an expression using a number representing the particular position in combination with the one-letter code or the three-letter code of the amino acid can be appropriately used. For example, an amino acid 37V, which is an amino acid contained in a single-domain antibody, represents Val located at position 37 defined by the Kabat numbering.

[0568] For the alteration of an amino acid in the amino acid sequence of a polypeptide, a method known in the art such as site-directed mutagenesis (Kunkel et al. (Proc. Natl. Acad. Sci. USA (1985) 82, 488-492)) or overlap extension PCR can be appropriately adopted. A plurality of methods known in the art can also be adopted as alteration methods for substituting an amino acid by an amino acid other than a natural amino acid (Annu. Rev. Biophys. Biomol. Struct. (2006) 35, 225-249; and Proc. Natl. Acad. Sci. U.S.A. (2003) 100 (11), 6353-6357). For example, a tRNA-containing cell-free translation system (Clover Direct (Protein Express)) having a non-natural amino acid bound with amber suppressor tRNA complementary to UAG codon (amber codon), which is a stop codon, is also preferably used. In the present specification, examples of the alteration include, but are not limited to, substitution.

[0569] In the present specification, the term “and/or” used to represent amino acid alteration sites is meant to include every combination appropriately represented by “and” and “or”. Specifically, for example, the phrase “amino acids at positions 37, 45, and/or 47 are substituted” includes the following variations of amino acid alteration: (a) position 37, (b) position 45, (c) position 47, (d) positions 37 and 45, (e) positions 37 and 47, (f) positions 45 and 47, and (g) positions 37, 45 and 47.

[0570] In the present specification, expression in which the one-letter codes or three-letter-codes of amino acids before and after alteration are used previous and next to a number representing a particular position can be appropriately used for representing amino acid alteration. For example, an alteration F37V or Phe37Val used for substituting an amino acid contained in an antibody variable region or a single-domain antibody represents the substitution of Phe at position 37 defined by the Kabat numbering by Val. Specifically, the number represents an amino acid position defined by the Kabat numbering; the one-letter code or three-letter code of the amino acid previous to the number represents the amino acid before the substitution; and the one-letter code or three-letter code of the amino acid next to the number represents the amino acid after the substitution. Likewise, an alteration P238A or Pro238Ala used for substituting an amino acid in a Fc region contained in an antibody constant region represents the substitution of Pro at position 238 defined by the EU numbering by Ala. Specifically, the number represents an amino acid position defined by the EU numbering; the one-letter code or three-letter code of the amino acid previous to the number represents the amino acid before the substitution; and the one-letter code or three-letter code of the amino acid next to the number represents the amino acid after the substitution.

[0571] In the present specification, the term “antibody” is used in the broadest sense and encompasses various antibody structures including, but are not limited to, a monoclonal antibody, a polyclonal antibody, a multispecific antibody (e.g., a bispecific antibody), a single-domain antibody, and an antibody fragment as long as the antibody exhibits the desired antigen binding activity.

[0572] The “antibody fragment” refers to a molecule, other than a complete antibody, containing a portion of the complete antibody and binding to an antigen to which the complete antibody binds. Examples of the antibody fragment include, but are not limited to, Fv, Fab, Fab′, Fab′-SH, F(ab′)2, diabody, linear antibodies, single-chain antibody molecules (e.g., scFv), and multispecific antibodies formed from antibody fragments.

[0573] The terms “full-length antibody”, “complete antibody”, and “whole antibody” are used interchangeably with each other in the present specification and refer to an antibody having a structure substantially similar to a natural antibody structure, or having heavy chains containing a Fc region defined in the present specification.

[0574] The term “variable region” or “variable domain” refers to a region or a domain of an antibody heavy chain or light chain involved in the binding of the antibody to its antigen. Usually, antibody heavy chain and light chain variable domains (VH and VL, respectively) are structurally similar and each contain 4 conserved framework regions (FRs) and 3 complementarity determining regions (CDRs) (see e.g., Kindt et al., Kuby Immunology, 6th ed., W.H. Freeman and Co., page 91 (2007)). One VH or VL domain may suffice for conferring antigen binding specificity.

[0575] The term “complementarity determining region” or “CDR” used in the present specification is hypervariable in the sequence, and/or forms a structurally determined loop (“hypervariable loop”), and/or refers to antigen contact residues (“antigen contacts”) or each region of an antibody variable domain. Usually, an antibody contains 6 CDRs: three in VH (H1, H2, and H3), and three in VL (L1, L2, and L3). In the present specification, exemplary CDRs include the following:
[0576] (a) hypervariable loops formed at amino acid residues 26 to 32 (L1), 50 to 52 (L2), 91 to 96 (L3), 26 to 32 (H1), 53 to 55 (H2), and 96 to 101 (H3) (Chothia and Lesk, J. Mol. Biol. 196: 901-917 (1987));
[0577] (b) CDRs formed at amino acid residues 24 to 34 (L1), 50 to 56 (L2), 89 to 97 (L3), 31 to 35b (H1), 50 to 65 (H2), and 95 to 102 (H3) (Kabat et al., Sequences of Proteins of Immunological Interest, 5th Ed. Public Health Service, National Institutes of Health, Bethesda, Md. (1991));
[0578] (c) antigen contacts formed at amino acid residues 27c to 36 (L1), 46 to 55 (L2), 89 to 96 (L3), 30 to 35b (H1), 47 to 58 (H2), and 93 to 101 (H3) (MacCallum et al., J. Mol. Biol. 262: 732-745 (1996)); and
[0579] (d) a combination of (a), (b), and/or (c) containing HVR amino acid residues 46 to 56 (L2), 47 to 56 (L2), 48 to 56 (L2), 49 to 56 (L2), 26 to 35 (H1), 26 to 35b (H1), 49 to 65 (H2), 93 to 102 (H3), and 94 to 102 (H3).

[0580] In the present specification, CDR residues and other residues (e.g., FR residues) in a variable domain are numbered according to Kabat et al. (supra), unless otherwise specified.

[0581] The term “framework” or “FR” refers to variable domain residues other than complementarity determining region (CDR) residues. FRs in a variable domain consist of 4 FR domains: FR1, FR2, FR3, and FR4. Accordingly, the sequences of CDRs and FRs usually appear in VH (or VL) in the following order: FR1-H1 (L1)-FR2-H2 (L2)-FR3-H3 (L3)-FR4.

[0582] In the present specification, the term “constant region” or “constant domain” refers to a region or a domain other than variable regions in an antibody. For example, an IgG antibody is a heterotetrameric glycoprotein of approximately 150,000 Da constituted by two identical light chains and two identical heavy chains connected through disulfide bonds. Each heavy chain has a variable region (VH) also called variable heavy chain domain or heavy chain variable domain, followed by a heavy chain constant region (CH) containing a CH1 domain, a hinge region, a CH2 domain, and a CH3 domain, from the N terminus toward the C terminus. Likewise, each light chain has a variable region (VL) also called variable light chain domain or light chain variable domain, followed by a constant light chain (CL) domain, from the N terminus toward the C terminus. The light chains of natural antibodies may be attributed to one of two types called kappa and lambda on the basis of the amino acid sequences of their constant domains.

[0583] In the present specification, the term “Fc region” is used for defining the C-terminal region of immunoglobulin heavy chains, including at least a portion of constant regions. This term includes a Fc region having a natural sequence and a mutant Fc region. In one embodiment, the heavy chain Fc region of human IgG1 spans from Cys226 or Pro230 to the carboxyl terminus of the heavy chain. However, the C-terminal lysine (Lys447) or glycine-lysine (Gly446-Lys447) of the Fc region may be present or absent. In the present specification, amino acid residues in a Fc region or a constant region are numbered according to the EU numbering system (also called EU index) described in Kabat et al., Sequences of Proteins of Immunological Interest, 5th Ed. Public Health Service, National Institutes of Health, Bethesda, Md. 1991, unless otherwise specified.

[0584] The “class” of an antibody refers to the type of a constant domain or a constant region carried by the heavy chain of the antibody. Antibodies have 5 major classes: IgA, IgD, IgE, IgG, and IgM. Some of these classes may be further divided into subclasses (isotypes), for example, IgG1, IgG2, IgG3, IgG4, IgA1, and IgA2. Heavy chain constant domains corresponding to immunoglobulins of different classes are called alpha, delta, epsilon, gamma, and mu, respectively.

[0585] In the present specification, the “antigen binding domain” is limited only by binding to the antigen of interest. The antigen binding domain can be a domain having any structure as long as the domain used binds to the antigen of interest. Examples of such a domain include, but are not limited to, an antibody heavy chain variable region (VH), an antibody light chain variable region (VL), a single-domain antibody (sdAb), an antagonist, a module called A domain of approximately 35 amino acids contained in an in vivo cell membrane protein avimer (International Publication Nos. WO2004/044011 and WO2005/040229), adnectin containing a 10Fn3 domain serving as a protein binding domain derived from a glycoprotein fibronectin expressed on cell membranes (International Publication No. WO2002/032925), Affibody containing an IgG binding domain scaffold constituting a three-helix bundle composed of 58 amino acids of protein A (International Publication No. WO1995/001937), DARPins (designed ankyrin repeat proteins) which are molecular surface-exposed regions of ankyrin repeats (AR) each having a 33-amino acid residue structure folded into a subunit of a turn, two antiparallel helices, and a loop (International Publication No. WO2002/020565), anticalin having four loop regions connecting eight antiparallel strands bent toward the central axis in one end of a barrel structure highly conserved in lipocalin molecules such as neutrophil gelatinase-associated lipocalin (NGAL) (International Publication No. WO2003/029462), and a depressed region in the internal parallel sheet structure of a horseshoe-shaped fold composed of repeated leucine-rich-repeat (LRR) modules of an immunoglobulin structure-free variable lymphocyte receptor (VLR) as seen in the acquired immune systems of jawless vertebrates such as lamprey or hagfish (International Publication No. WO2008/016854).

[0586] Preferred examples of the antigen binding domain of the present invention include an antigen binding domain that can exert an antigen binding function by a molecule constituted only by the antigen binding domain, and an antigen binding domain that can exert an antigen binding function by itself after being released from an additional peptide linked thereto. Examples of such an antigen binding domain include, but are not limited to, a single-domain antibody, scFv, Fv, Fab, Fab′, F(ab′)2, and an antagonist.

[0587] One preferred example of the antigen binding domain of the present invention includes an antigen binding domain having a molecular weight of 120 kDa, 100 kDa, 80 kDa, 60 kDa, 40 kDa, 20 kDa or smaller. Examples of such an antigen binding domain include, but are not limited to, single-domain antibodies, scFv, Fab, Fab′, and an antagonist. The antigen binding domain having a molecular weight of 60 kDa or smaller is usually likely to cause clearance by the kidney when existing as a monomer in blood (see J Biol Chem. 1988 Oct. 15; 263 (29): 15064-70). In one embodiment, the antigen binding domain having a molecular weight of 120 kDa or smaller is likely to cause penetrate deeply in the cartilage tissue.

[0588] From another viewpoint, one preferred example of the antigen binding domain of the present invention includes an antigen binding domain having a half-life in blood of 12 hours or shorter. Examples of such an antigen binding domain include, but are not limited to, single-domain antibodies, scFv, Fab, Fab′, and an antagonist.

[0589] One preferred example of the antigen binding domain of the present invention includes a single-domain antibody (sdAb), and an antagonist.

[0590] In the present specification, the term “single-domain antibody” is not limited by its structure as long as the domain can exert antigen binding activity by itself. It is known that a general antibody, for example, an IgG antibody, exhibits antigen binding activity in a state where a variable region is formed by the pairing of VH and VL, whereas the own domain structure of the single-domain antibody can exert antigen binding activity by itself without pairing with another domain. Usually, the single-domain antibody has a relatively low molecular weight and exists in the form of a monomer.

[0591] Examples of the single-domain antibody include, but are not limited to, antigen binding molecules congenitally lacking a light chain, such as VHH of an animal of the family Camelidae and shark VNAR, and antibody fragments containing the whole or a portion of an antibody VH domain or the whole or a portion of an antibody VL domain. Examples of the single-domain antibody which is an antibody fragment containing the whole or a portion of an antibody VH or VL domain include, but are not limited to, artificially prepared single-domain antibodies originating from human antibody VH or human antibody VL as described in U.S. Pat. No. 6,248,516 B1, etc. In some embodiments of the present invention, one single-domain antibody has three CDRs (CDR1, CDR2 and CDR3).

[0592] The single-domain antibody can be obtained from an animal capable of producing the single-domain antibody or by the immunization of the animal capable of producing the single-domain antibody. Examples of the animal capable of producing the single-domain antibody include, but are not limited to, animals of the family Camelidae, and transgenic animals harboring a gene capable of raising the single-domain antibody. The animals of the family Camelidae include camels, lamas, alpacas, one-hump camels and guanacos, etc. Examples of the transgenic animals harboring a gene capable of raising the single-domain antibody include, but are not limited to, transgenic animals described in International Publication No. WO2015/143414 and U.S. Patent Publication No. US2011/0123527 A1. The framework sequences of the single-domain antibody obtained from the animal may be converted to human germline sequences or sequences similar thereto to obtain a humanized single-domain antibody. The humanized single-domain antibody (e.g., humanized VHH) is also one embodiment of the single-domain antibody of the present invention.

[0593] Alternatively, the single-domain antibody can be obtained by ELISA, panning, or the like from a polypeptide library containing single-domain antibodies. Examples of the polypeptide library containing single-domain antibodies include, but are not limited to, naive antibody libraries obtained from various animals or humans (e.g., Methods in Molecular Biology 2012 911 (65-78); and Biochimica et Biophysica Acta—Proteins and Proteomics 2006 1764: 8 (1307-1319)), antibody libraries obtained by the immunization of various animals (e.g., Journal of Applied Microbiology 2014 117:2 (528-536)), and synthetic antibody libraries prepared from antibody genes of various animals or humans (e.g., Journal of Biomolecular Screening 2016 21: 1 (35-43); Journal of Biological Chemistry 2016 291:24 (12641-12657); and AIDS 2016 30: 11 (1691-1701)).

[0594] In one embodiment, the sequences of CDRs and frameworks of a single domain antibody usually appear in the following order: FR1-H1 (L1)-FR2-H2 (L2)-FR3-H3 (L3)-FR4.

[0595] Generally, a single domain antibody of the present invention can be defined as a polypeptide comprising:
[0596] a) An amino acid sequence that is comprised of four framework regions/sequences interrupted by three complementarity determining regions/sequences (in which the amino acid residue at position 11 according to the Kabat numbering is chosen from the group consisting of L, M, S, V, and W, and is preferably L); and/or:
[0597] b) An amino acid sequence that is comprised of four framework regions/sequences interrupted by three complementarity determining regions/sequences (in which the amino acid residue at position 37 according to the Kabat numbering is chosen from the group consisting of F, Y, H, I, L, and V, and is preferably F or Y); and/or:
[0598] c) An amino acid sequence that is comprised of four framework regions/sequences interrupted by three complementarity determining regions/sequences (in which the amino acid residue at position 44 according to the Kabat numbering is chosen from the group consisting of G, E, A, D, Q, R, S, and L, and is preferably G, E, or Q); and/or:
[0599] d) An amino acid sequence that is comprised of four framework regions/sequences interrupted by three complementarity determining regions/sequences (in which the amino acid residue at position 45 according to the Kabat numbering is chosen from the group consisting of L, R, C, I, L, P, Q and V, and is preferably L or R); and/or:
[0600] e) An amino acid sequence that is comprised of four framework regions/sequences interrupted by three complementarity determining regions/sequences (in which the amino acid residue at position 47 according to the Kabat numbering is chosen from the group consisting of W, L, F, A, G, I, M, R, S, V, and Y, and is preferably W, L, F or R); and/or:
[0601] f) An amino acid sequence that is comprised of four framework regions/sequences interrupted by three complementarity determining regions/sequences (in which the amino acid residue at position 83 according to the Kabat numbering is chosen from the group consisting of R, K, N, E, G, I, M, Q and T, and is preferably K or R, and more preferably K); and/or:
[0602] g) An amino acid sequence that is comprised of four framework regions/sequences interrupted by three complementarity determining regions/sequences (in which the amino acid residue at position 84 according to the Kabat numbering is chosen from the group consisting of P, A, L, R, S, T, D and V, and is preferably P); and/or:
[0603] h) An amino acid sequence that is comprised of four framework regions/sequences interrupted by three complementarity determining regions/sequences (in which the amino acid residue at position 103 according to the Kabat numbering is chosen from the group consisting of W, P, R, and S, and is preferably and W); and/or:
[0604] i) An amino acid sequence that is comprised of four framework regions/sequences interrupted by three complementarity determining regions/sequences (in which the amino acid residue at position 104 according to the Kabat numbering is G or D, and preferably G); and/or:
[0605] j) An amino acid sequence that is comprised of four framework regions/sequences interrupted by three complementarity determining regions/sequences (in which the amino acid residue at position 108 according to the Kabat numbering is chosen from the group consisting of Q, L, and R, and is preferably Q or L).

[0606] More in particular, in one embodiment, a single domain antibody of the present invention can be defined as a polypeptide comprising an amino acid sequence that is comprised of four framework regions/sequences interrupted by three complementarity determining regions/sequences selected from the group consisting of 1) to 3) below:
[0607] k) Amino acid residues at position 43 to 46 according to the Kabat numbering are KERE (SEQ ID NO: 620) or KQRE (SEQ ID NO: 621),
[0608] l) Amino acid residues at position 44 to 47 according to the Kabat numbering are GLEW (SEQ ID NO: 622), and
[0609] m) Amino acid residues at position 83 to 84 according to the Kabat numbering are KP or EP.

[0610] In one embodiment, “Humanized single domain antibody” herein refers to a chimeric single domain antibody comprising amino acid residues from CDR of non-human and human Framework. In one embodiment, in humanized single domain antibody all or substantially all CDRs can be corresponded to those of non-human antibody, and all or substantially all Framework can be corresponded to those of human antibody. In case that in humanized antibody a part of amino acid residues in Framework cannot be corresponded to those of human antibody, it is considered that substantially all Framework can be corresponded to those of human antibody. For instance, in case that VHH as one embodiment of a single domain antibody is humanized, it is required that a part of amino acid residues in Framework is converted to amino acid residues which are not corresponded to those of human antibody (C Vincke, et al., The Journal of Biological Chemistry 284, 3273-3284.)

[0611] In one embodiment of the present invention, the single-domain antibody is preferably a VHH, a VH having antigen binding activity by itself or a VL having antigen binding activity by itself. In the present specification, from another viewpoint, “a VH having antigen binding activity by itself” and “a VL having antigen binding activity by itself” can also be defined as “a single-domain antibody prepared from VH,” and “a single-domain antibody prepared from VL”, respectively.

[0612] In one embodiment, the antigen binding domain of the present invention may bind to IL-1R1, IL-1alpha, IL-1beta and/or IL-1RAcP. Further, in one embodiment, the antigen binding domain of the present invention may be a single-domain antibody or an antagonist. Moreover, in one embodiment, the single-domain antibody may be a VHH, a VH having antigen binding activity by itself or a VL having antigen binding activity by itself. Accordingly, in one embodiment, the antigen binding domain of the present invention may be a VHH, a VH having antigen binding activity by itself or a VL having antigen binding activity by itself that may bind to or recognize IL-1R1, IL-1alpha, IL-1beta and/or IL-1RAcP.

[0613] In the present invention, a soluble IL-1R may be exemplified as an antigen binding domain binding to IL-1alpha and/or IL-1beta. Further, in an embodiment, the antigen-binding domain of the present invention may be a soluble IL-1R1, soluble IL-1R2, soluble IL-1RAcP or a single-domain antibody binding to IL-1alpha and/or IL-1beta. Moreover, the following substances are also exemplified as an antigen binding domain of the present application:
[0614] a VL having antigen binding activity by itself that binds to IL-1R1: DOM4-122-23 having an amino acid sequence of SEQ ID NO: 479 and DOM4-130-202 having an amino acid sequence of SEQ ID NO: 480,
[0615] a VH having antigen binding activity by itself that binds to IL-1R1:
[0616] a VHH having antigen binding activity by itself that binds to IL-1R1:
[0617] an antagonist to IL-1R (IL-1Ra): interleukin-1 receptor antagonist protein (Accession no. of protein: NP_776214 (SEQ ID NO:527), Accession no. of mRNA: NM_173842.2), AMG108 (Amgen, H chain of SEQ ID NO: 515, 516 or 517, L chain of SEQ ID NO: 522, 523, or 524), Anakinra (Amgen, SEQ ID NO: 526), ABT-981 (AbbVie, H chain of SEQ ID NO: 512, L chain of SEQ ID NO: 519), Canakinumab (Novartis, H chain of SEQ ID NO: 513, L chain of SEQ ID NO: 520), Gevokizumab (Xoma, H chain of SEQ ID NO: 514, L chain of SEQ ID NO: 521), MABp1 (XBiotech, H chain of SEQ ID NO: 518, L chain of SEQ ID NO: 525).

[0618] In the present invention, antibody fragments of the above antibodies can also be used as the antigen-binding domain so long as they exhibit the antagonistic activity to IL-1R. Examples of antibody fragments include but are not limited to Fv, Fab, Fab′, Fab′-SH, F(ab′)2; diabodies; linear antibodies; single-chain antibody molecules (e.g., scFv).
[0619] a VL having antigen binding activity by itself that binds to IL-1alpha:
[0620] a VH having antigen binding activity by itself that binds to IL-1alpha:
[0621] a VHH having antigen binding activity by itself that binds to IL-1alpha:
[0622] a VL having antigen binding activity by itself that binds to IL-1beta
[0623] a VH having antigen binding activity by itself that binds to IL-1beta:
[0624] a VHH having antigen binding activity by itself that binds to IL-1beta:
[0625] a VL having antigen binding activity by itself that binds to IL-1RAcP:
[0626] a VH having antigen binding activity by itself that binds to IL-1RAcP:
[0627] a VHH having antigen binding activity by itself that binds to IL-1RAcP:

[0628] Such an embodiment should be obvious to those skilled in the art with reference to the present specification and is included in the scope of the present invention.

[0629] In the present specification, the “antigen” is limited only by containing an epitope to which the antigen binding domain binds. Preferred examples of the antigen include, but are not limited to, animal- or human-derived peptides, polypeptides, and proteins. Preferred examples of the antigen for use in the treatment of a disease caused by a target tissue include, but are not limited to, molecules expressed on the surface of target cells (e.g., cancer cells and inflammatory cells), molecules expressed on the surface of other cells in tissues containing target cells, molecules expressed on the surface of cells having an immunological role against target cells and tissues containing target cells, and large molecules present in the stromata of tissues containing target cells.

[0630] In one embodiment, antigens may be derived from any animal species (for example, human; or nonhuman animals such as mouse, rat, hamster, guinea pig, rabbit, monkey, cynomolgus monkey, Rhesus monkey, hamadryas baboon, chimpanzee, goat, sheep, dog, horse, pig, bovine, or camel), or any birds; and the antigens are preferably derived from human, rabbit, monkey, rat, or mouse.

[0631] Examples of the antigen can include the following molecules: 17-IA, 4-1BB, 4Dc, 6-keto-PGF1a, 8-iso-PGF2a, 8-oxo-dG, A1 adenosine receptor, A33, ACE, ACE-2, activin, activin A, activin AB, activin B, activin C, activin RIA, activin RIA ALK-2, activin RIB ALK-4, activin RIIA, activin RIIB, ADAM, ADAM10, ADAM12, ADAM15, ADAM17/TACE, ADAM8, ADAM9, ADAMTS, ADAMTS4, ADAMTS5, addressin, aFGF, ALCAM, ALK, ALK-1, ALK-7, alpha-1-antitrypsin, alpha-V/beta-1 antagonist, ANG, Ang, APAF-1, APE, APJ, APP, APRIL, AR, ARC, ART, artemin, anti-Id, ASPARTIC, atrial natriuretic factor, av/b3 integrin, Ax1, b2M, B7-1, B7-2, B7-H, B-lymphocyte stimulator (BlyS), BACE, BACE-1, Bad, BAFF, BAFF-R, Bag-1, BAK, Bax, BCA-1, BCAM, Bcl, BCMA, BDNF, b-ECGF, bFGF, BID, Bik, BIM, BLC, BL-CAM, BLK, BMP, BMP-2 BMP-2a, BMP-3 osteogenin, BMP-4 BMP-2b, BMP-5, BMP-6 Vgr-1, BMP-7 (OP-1), BMP-8 (BMP-8a, OP-2), BMPR, BMPR-IA (ALK-3), BMPR-IB (ALK-6), BRK-2, RPK-1, BMPR-II (BRK-3), BMP, b-NGF, BOK, bombesin, bone-derived neurotrophic factor, BPDE, BPDE-DNA, BTC, complement factor 3 (C3), C3a, C4, C5, C5a, C10, CA125, CAD-8, calcitonin, cAMP, carcinoembryonic antigen (CEA), cancer-associated antigens, cathepsin A, cathepsin B, cathepsin C/DPPI, cathepsin D, cathepsin E, cathepsin H, cathepsin L, cathepsin O, cathepsin S, cathepsin V, cathepsin X/Z/P, CBL, CCI, CCK2, CCL, CCL1, CCL11, CCL12, CCL13, CCL14, CCL15, CCL16, CCL17, CCL18, CCL19, CCL2, CCL20, CCL21, CCL22, CCL23, CCL24, CCL25, CCL26, CCL27, CCL28, CCL3, CCL4, CCL5, CCL6, CCL7, CCL8, CCL9/10, CCR, CCR1, CCR10, CCR10, CCR2, CCR3, CCR4, CCR5, CCR6, CCR7, CCR8, CCR9, CD1, CD2, CD3, CD3E, CD4, CD5, CD6, CD7, CD8, CD10, CD11a, CD11b, CD11c, CD13, CD14, CD15, CD16, CD18, CD19, CD20, CD21, CD22, CD23, CD25, CD27L, CD28, CD29, CD30, CD30L, CD32, CD33 (p67 protein), CD34, CD38, CD40, CD40L, CD44, CD45, CD46, CD49a, CD52, CD54, CD55, CD56, CD61, CD64, CD66e, CD74, CD80 (B7-1), CD89, CD95, CD123, CD137, CD138, CD140a, CD146, CD147, CD148, CD152, CD164, CEACAM5, CFTR, cGMP, CINC, botulinum toxin, Clostridium perfringens toxin, CKb8-1, CLC, CMV, CMV UL, CNTF, CNTN-1, COX, C-Ret, CRG-2, CT-1, CTACK, CTGF, CTLA-4, PD1, PDL1, LAGS, TIM3, galectin-9, CX3CL1, CX3CR1, CXCL, CXCL1, CXCL2, CXCL3, CXCL4, CXCL5, CXCL6, CXCL7, CXCL8, CXCL9, CXCL10, CXCL11, CXCL12, CXCL13, CXCL14, CXCL15, CXCL16, CXCR, CXCR1, CXCR2, CXCR3, CXCR4, CXCR5, CXCR6, cytokeratin tumor-associated antigens, DAN, DCC, DcR3, DC-SIGN, decay accelerating factor, des(1-3)-IGF-I (brain IGF-1), Dhh, digoxin, DNAM-1, Dnase, Dpp, DPPIV/CD26, Dtk, ECAD, EDA, EDA-A1, EDA-A2, EDAR, EGF, EGFR (ErbB-1), EMA, EMMPRIN, ENA, endothelin receptor, enkephalinase, eNOS, Eot, eotaxin 1, EpCAM, ephrin B2/EphB4, EPO, ERCC, E-selectin, ET-1, factor IIa, factor VII, factor VIIIc, factor IX, fibroblast-activating protein (FAP), Fas, FcR1, FEN-1, ferritin, FGF, FGF-19, FGF-2, FGF3, FGF-8, FGFR, FGFR-3, fibrin, FL, FLIP, Flt-3, Flt-4, follicle-stimulating hormone, fractalkine, FZD1, FZD2, FZD3, FZD4, FZD5, FZD6, FZD7, FZD8, FZD9, FZD10, G250, Gas6, GCP-2, GCSF, GD2, GD3, GDF, GDF-1, GDF-3 (Vgr-2), GDF-5 (BMP-14, CDMP-1), GDF-6 (BMP-13, CDMP-2), GDF-7 (BMP-12, CDMP-3), GDF-8 (myostatin), GDF-9, GDF-15 (MIC-1), GDNF, GDNF, GFAP, GFRa-1, GFR-alpha 1, GFR-alpha 2, GFR-alpha 3, GITR, glucagon, Glut4, glycoprotein (GPIIb/IIIa), GM-CSF, gp130, gp72, GRO, growth hormone-releasing factor, hapten (NP-cap or NIP-cap), HB-EGF, HCC, HCMV gB envelope glycoprotein, HCMV gH envelope glycoprotein, HCMV UL, hematopoietic growth factor (HGF), Hep B gp120, heparanase, Her2, Her2/neu (ErbB-2), Her3 (ErbB-3), Her4 (ErbB-4), herpes simplex virus (HSV) gB glycoprotein, HSV gD glycoprotein, HGFA, high-molecular-weight melanoma-associated antigen (HMW-MAA), HIV gp120, HIV IIIB gp 120 V3 loop, HLA, HLA-DR, HM1.24, HMFG PEM, HRG, Hrk, human heart myosin, human cytomegalovirus (HCMV), human growth hormone (HGH), HVEM, 1-309, IAP, ICAM, ICAM-1, ICAM-3, ICE, ICOS, IFNg, Ig, IgA receptor, IgE, IGF, IGF binding protein, IGF-1R, IGFBP, IGF-I, IGF-II, IL, IL-1, IL-1R, IL-2, IL-2R, IL-4, IL-4R, IL-5, IL-5R, IL-6, IL-6R, IL-8, IL-9, IL-10, IL-12, IL-13, IL-15, IL-18, IL-18R, IL-21, IL-23, IL-27, interferon (INF)-alpha, INF-beta, INF-gamma, inhibin, iNOS, insulin chain A, insulin chain B, insulin-like growth factor 1, integrin alpha 2, integrin alpha 3, integrin alpha 4, integrin alpha 4/beta 1, integrin alpha 4/beta 7, integrin alpha 5 (alpha V), integrin alpha 5/beta 1, integrin alpha 5/beta 3, integrin alpha 6, integrin beta 1, integrin beta 2, interferon gamma, IP-10, I-TAC, JE, kallikrein 2, kallikrein 5, kallikrein 6, kallikrein 11, kallikrein 12, kallikrein 14, kallikrein 15, kallikrein L1, kallikrein L2, kallikrein L3, kallikrein L4, KC, KDR, keratinocyte growth factor (KGF), laminin 5, LAMP, LAP, LAP (TGF-1), latent TGF-1, latent TGF-1 bp1, LBP, LDGF, LECT2, lefty, Lewis-Y antigen, Lewis-Y-related antigen, LFA-1, LFA-3, Lfo, LIF, LIGHT, lipoprotein, LIX, LKN, Lptn, L-selectin, LT-a, LT-b, LTB4, LTBP-1, lung surface, luteinizing hormone, lymphotoxin beta receptor, Mac-1, MAdCAM, MAG, MAP2, MARC, MCAM, MCAM, MCK-2, MCP, M-CSF, MDC, Mer, metalloproteinases, MGDF receptor, MGMT, MHC (HLA-DR), MIF, MIG, MIP, MIP-1-alpha, MK, MMAC1, MMP, MMP-1, MMP-10, MMP-11, MMP-12, MMP-13, MMP-14, MMP-15, MMP-2, MMP-24, MMP-3, MMP-7, MMP-8, MMP-9, MPIF, Mpo, MSK, MSP, mucin (Muc1), MUC18, mullerian-inhibiting substance, Mug, MuSK, NAIP, NAP, NCAD, N-C adherin, NCA 90, NCAM, NCAM, neprilysin, neurotrophin-3, -4, or -6, neurturin, nerve growth factor (NGF), NGFR, NGF-beta, nNOS, NO, NOS, Npn, NRG-3, NT, NTN, OB, OGG1, OPG, OPN, OSM, OX40L, OX40R, p150, p95, PADPr, parathyroid hormone, PARC, PARP, PBR, PBSF, PCAD, P-cadherin, PCNA, PDGF, PDGF, PDK-1, PECAM, PEM, PF4, PGE, PGF, PGI2, PGJ2, PIN, PLA2, placental alkaline phosphatase (PLAP), PlGF, PLP, PP14, proinsulin, prorelaxin, protein C, PS, PSA, PSCA, prostate-specific membrane antigen (PSMA), PTEN, PTHrp, Ptk, PTN, R51, RANK, RANKL, RANTES, RANTES, relaxin A chain, relaxin B chain, renin, respiratory syncytial virus (RSV) F, RSV Fgp, Ret, rheumatoid factor, RLIP76, RPA2, RSK, S100, SCF/KL, SDF-1, SERINE, serum albumin, sFRP-3, Shh, SIGIRR, SK-1, SLAM, SLPI, SMAC, SMDF, SMOH, SOD, SPARC, Stat, STEAP, STEAP-II, TACE, TACI, TAG-72 (tumor-associated glycoprotein-72), TARC, TCA-3, T cell receptor (e.g., T cell receptor alpha/beta), TdT, TECK, TEM1, TEMS, TEM7, TEM8, TERT, testicular PLAP-like alkaline phosphatase, TfR, TGF, TGF-alpha, TGF-beta, TGF-beta Pan Specific, TGF-beta RI (ALK-5), TGF-beta RII, TGF-beta RIIb, TGF-beta RIII, TGF-beta 1, TGF-beta 2, TGF-beta 3, TGF-beta 4, TGF-beta 5, thrombin, thymus Ck-1, thyroid stimulating hormone, Tie, TIMP, TIQ, tissue factor, TMEFF2, Tmpo, TMPRSS2, TNF, TNF-alpha, TNF-alpha/beta, TNF-beta 2, TNFc, TNF-RI, TNF-RII, TNFRSF10A (TRAIL R1 Apo-2, DR4), TNFRSF10B (TRAIL R2 DR5, KILLER, TRICK-2A, TRICK-B), TNFRSF10C (TRAIL R3 DcR1, LIT, TRID), TNFRSF10D (TRAIL R4 DcR2, TRUNDD), TNFRSF11A (RANK ODF R, TRANCE R), TNFRSF11B (OPG OCIF, TR1), TNFRSF12 (TWEAK R FN14), TNFRSF13B (TACI), TNFRSF13C (BAFF R), TNFRSF14 (HVEM ATAR, HveA, LIGHT R, TR2), TNFRSF16 (NGFR p75NTR), TNFRSF17 (BCMA), TNFRSF18 (GITR AITR), TNFRSF19 (TROY TAJ, TRADE), TNFRSF19L (RELT), TNFRSF1A (TNF RI CD120a, p55-60), TNFRSF1B (TNF RII CD120b, p75-80), TNFRSF26 (TNFRH3), TNFRSF3 (LTbR TNF RIII, TNFC R), TNFRSF4 (OX40 ACT35, TXGP1 R), TNFRSF5 (CD40 p50), TNFRSF6 (Fas Apo-1, APT1, CD95), TNFRSF6B (DcR3 M68, TR6), TNFRSF7 (CD27), TNFRSF8 (CD30), TNFRSF9 (4-1BB CD137, ILA), TNFRSF21 (DR6), TNFRSF22 (DcTRAIL R2 TNFRH2), TNFRST23 (DcTRAIL R1 TNFRH1), TNFRSF25 (DR3 Apo-3, LARD, TR-3, TRAMP, WSL-1), TNFSF10 (TRAIL Apo-2 ligand, TL2), TNFSF11 (TRANCE/RANK ligand ODF, OPG ligand), TNFSF12 (TWEAK Apo-3 ligand, DR3 ligand), TNFSF13 (APRIL TALL2), TNFSF13B (BAFF BLYS, TALL1, THANK, TNFSF20), TNFSF14 (LIGHT HVEM ligand, LTg), TNFSF15 (TL1A/VEGI), TNFSF18 (GITR ligand AITR ligand, TL6), TNFSF1A (TNF-a Conectin, DIF, TNFSF2), TNFSF1B (TNF-b LTa, TNFSF1), TNFSF3 (LTb TNFC, p33), TNFSF4 (OX40 ligand gp34, TXGP1), TNFSF5 (CD40 ligand CD154, gp39, HIGM1, IMD3, TRAP), TNFSF6 (Fas ligand Apo-1 ligand, APT1 ligand), TNFSF7 (CD27 ligand CD70), TNFSF8 (CD30 ligand CD153), TNFSF9 (4-1BB ligand CD137 ligand), TP-1, t-PA, Tpo, TRAIL, TRAIL R, TRAIL-R1, TRAIL-R2, TRANCE, transferrin receptor, TRF, Trk, TROP-2, TLR (toll-like receptor) 1, TLR2, TLR3, TLR4, TLR5, TLR6, TLR7, TLR8, TLR9, TLR10, TSG, TSLP, tumor-associated antigen CA125, tumor-associated antigen-expressing Lewis-Y-related carbohydrate, TWEAK, TXB2, Ung, uPAR, uPAR-1, urokinase, VCAM, VCAM-1, VECAD, VE-cadherin, VE-cadherin-2, VEFGR-1 (flt-1), VEGF, VEGFR, VEGFR-3 (flt-4), VEGI, VIM, viral antigens, VLA, VLA-1, VLA-4, VNR integrin, von Willebrand factor, WIF-1, WNT1, WNT2, WNT2B/13, WNT3, WNT3A, WNT4, WNT5A, WNT5B, WNT6, WNT7A, WNT7B, WNT8A, WNT8B, WNT9A, WNT9A, WNT9B, WNT10A, WNT10B, WNT11, WNT16, XCL1, XCL2, XCR1, XCR1, XEDAR, XIAP, XPD, HMGB1, IgA, A beta, CD81, CD97, CD98, DDR1, DKK1, EREG, Hsp90, IL-17/IL-17R, IL-20/IL-20R, oxidized LDL, PCSK9, prekallikrein, RON, TMEM16F, SOD1, chromogranin A, chromogranin B, tau, VAP1, high-molecular-weight kininogen, IL-31, IL-31R, Nav1.1, Nav1.2, Nav1.3, Nav1.4, Nav1.5, Nav1.6, Nav1.7, Nav1.8, Nav1.9, EPCR, C1, C1q, C1r, C1s, C2, C2a, C2b, C3, C3a, C3b, C4, C4a, C4b, C5, C5a, C5b, C6, C7, C8, C9, factor B, factor D, factor H, properdin, sclerostin, fibrinogen, fibrin, prothrombin, thrombin, tissue factor, factor V, factor Va, factor VII, factor VIIa, factor VIII, factor VIIIa, factor IX, factor IXa, factor X, factor Xa, factor XI, factor XIa, factor XII, factor XIIa, factor XIII, factor XIIIa, TFPI, antithrombin III, EPCR, thrombomodulin, TAPI, tPA, plasminogen, plasmin, PAI-1, PAI-2, GPC3, syndecan-1, syndecan-2, syndecan-3, syndecan-4, LPA, SIP, receptors for hormones or growth factors, and a molecule present in a cartilage tissue.

[0632] The NCBI (National Center for Biotechnology Information, U.S. National Library of Medicine) database accession numbers and the SEQ ID NOs used herein are shown below for nucleic acid sequences and amino acid sequences for IL-1R1, IL-1R2, IL-1alpha, IL-1beta and IL-1RAcP:
[0633] IL-1R1: a nucleic acid sequence NM_001320982.1, an amino acid sequence NP_001307911 (SEQ ID NO: 528)
[0634] IL-1R2 transcript variant 1: a nucleic acid sequence NM_004633.3, an amino acid sequence NP_004624.1 (SEQ ID NO: 529)
[0635] IL-1alpha: a nucleic acid sequence NM_000575.4, an amino acid sequence NP_000566 (SEQ ID NO: 530)
[0636] IL-1beta: a nucleic acid sequence NM_000576.2, an amino acid sequence NP_000567 (SEQ ID NO: 531)
[0637] IL-1RAcP: a nucleic acid sequence NM_001167929.1, an amino acid sequence NP_001161401 (SEQ ID NO: 532)

[0638] In the present invention, IL1-R1, IL1-R2, IL-1alpha, IL-1beta and IL-1RAcP includes any isoforms, polymorphisms and variants (including allelic variants and splicing variants) of IL1-R1, IL1-R2, IL-1alpha, IL-1beta and IL-1RAcP.

[0639] Although the examples of the antigen listed above also include receptors, these receptors even existing in a soluble form in a body fluid can be used as the antigen to which the antigen binding domain of the present invention binds. One non-limiting example of the soluble form of such a receptor can include the protein represented by SEQ ID NO: 35 which is soluble IL-6R as described by Mullberg et al. (J. Immunol. (1994) 152 (10), 4958-4968).

[0640] The examples of the antigen listed above include membrane molecules expressed on cell membranes, and soluble molecules secreted from cells to the outside of the cells. When the antigen binding domain of the present invention binds to a soluble molecule secreted from cells, the antigen binding domain preferably has neutralizing activity.

[0641] The solution containing the soluble molecule is not limited, and this soluble molecule may exist in a body fluid, i.e., every vascular liquid or every liquid filling between tissues or cells in living bodies. In a non-limiting aspect, the soluble molecule to which the antigen binding domain of the present invention binds can exist in an extracellular fluid. The extracellular fluid refers to a generic name for plasma, intercellular fluid, lymph, tight connective tissues, cerebrospinal fluid, spinal fluid, aspirates, synovial fluid, or such components in the bone and cartilage, alveolar fluid (bronchioalveolar lavage fluid), ascitic fluid, pleural effusion, cardiac effusion, cyst fluid, aqueous humor (hydatoid), or such transcellular fluids (various fluids in glandular cavities resulting from the active transport or secretory activity of cells, and fluids in the lumen of the gut and other body cavities) in vertebrates.

[0642] The antigen binding domain of the present invention may recognize or bind to an epitope within an antigen. The epitope, which means an antigenic determinant, present in the antigen means a site on the antigen to which the antigen binding domain disclosed in the present specification binds. Accordingly, for example, the epitope can be defined by its structure. Alternatively, the epitope may be defined by the antigen-binding activity of the antigen binding domain recognizing the epitope. When the antigen is a peptide or a polypeptide, the epitope may be identified by amino acid residues constituting the epitope. When the epitope is a sugar chain, the epitope may be identified by a particular sugar chain structure.

[0643] A linear epitope refers to an epitope comprising an epitope that is recognized by its primary sequence of amino acids. The linear epitope contains typically at least 3 and most commonly at least 5, for example, approximately 8 to approximately 10 or 6 to 20 amino acids, in its unique sequence.

[0644] In contrast to the linear epitope, a conformational epitope refers to an epitope that is contained in a primary sequence of amino acids containing a component other than the single defined component of the epitope to be recognized (e.g., an epitope whose primary sequence of amino acids may not be recognized by an antibody that determines the epitope). The conformational epitope may contain an increased number of amino acids, as compared with the linear epitope. As for the recognition of the conformational epitope, the antigen binding domain recognizes the three-dimensional structure of the peptide or the protein. For example, when a protein molecule is folded to form a three-dimensional structure, certain amino acids and/or polypeptide backbone constituting the conformational epitope are arranged in parallel to allow the antibody to recognize the epitope. Examples of the method for determining the conformation of the epitope include, but are not limited to, X-ray crystallography, two-dimensional nuclear magnetic resonance spectroscopy, and site-specific spin labeling and electron paramagnetic resonance spectroscopy. See, for example, Epitope Mapping Protocols in Methods in Molecular Biology (1996), Vol. 66, Morris ed.

[0645] The structure of the antigen binding domain binding to the epitope is called paratope. The paratope stably binds to the epitope through a hydrogen bond, electrostatic force, van der Waals' forces, a hydrophobic bond, or the like acting between the epitope and the paratope. This binding force between the epitope and the paratope is called affinity. The total binding force when a plurality of antigen binding domains bind to a plurality of antigens is called avidity. The affinity works synergistically when, for example, an antibody comprising a plurality of antigen binding domains (i.e., a polyvalent antibody) bind to a plurality of epitopes. Therefore, the avidity is higher than the affinity.

[0646] In a particular embodiment, the antigen binding domain provided in the present specification has a dissociation constant (Kd) of 1 micro M or less, 100 nM or less, 10 nM or less, 1 nM or less, 0.1 nM or less, 0.01 nM or less, or 0.001 nM or less (e.g., 10⁻⁸ M or less, for example, 10⁻⁸ M to 10⁻¹³ M, for example, 10⁻⁹ M to 10⁻¹³ M).

[0647] Hereinafter, an exemplary method for confirming the binding of an antigen binding domain directed to IL-6R, or a polypeptide comprising the antigen binding domain to the epitope will be shown. However, a method for confirming the binding of an antigen binding domain directed to an antigen other than IL-6R (for example, but are not limited to, IL-1R1, IL-1alpha, IL-1beta and/or IL-1RAcP), or a polypeptide comprising the antigen binding domain to the epitope can also be appropriately carried out according to the example given below.

[0648] For example, whether the antigen binding domain directed to IL-6R recognizes a linear epitope present in the IL-6R molecule can be confirmed, for example, as follows: a linear peptide comprising an amino acid sequence constituting the extracellular domain of IL-6R is synthesized for the purpose described above. The peptide can be chemically synthesized. Alternatively, the peptide is obtained by a genetic engineering approach using a region encoding an amino acid sequence corresponding to the extracellular domain in IL-6R cDNA. Next, the antigen binding domain directed to IL-6R is evaluated for its binding activity against the linear peptide comprising an amino acid sequence constituting the extracellular domain. For example, the binding activity of the antigen binding domain against the peptide can be evaluated by ELISA using an immobilized linear peptide as an antigen. Alternatively, the binding activity against the linear peptide may be determined on the basis of a level at which the linear peptide inhibits the binding of the antigen binding domain to IL-6R-expressing cells. These tests can determine the binding activity of the antigen binding domain against the linear peptide.

[0649] In an embodiment, the antigen-binding domain of the present invention may bind to an epitope of IL-1R1, 1L-1alpha, 1L-1beta, and/or IL-1RAcP. An epitope sequence in an antigen can be obtained by epitope analysis techniques well-known to those skilled in the art. In an embodiment, the epitope of the present invention may be present within the D1 domain, D2 domain, or D3 domain of IL-1R1 (PLoS One. 2015 Feb. 23; 10(2): e0118671). Further, in an embodiment, the epitope of the present invention may be present within the D3 domain of IL-1R1. Further, in an embodiment, the epitope of the present invention may compete with IL-1beta but not compete with IL-1Ra. Further, in an embodiment, the epitope of the present invention may allow cross-reactivity between human IL-1R1 and rabbit IL-1R1.

[0650] In one embodiment, an IL-1R1 binding domain of the present invention may compete for binding the epitope with a single-domain antibody VL selected from the group consisting of 1) and 2) below:
[0651] 1) a single-domain antibody VL comprising the amino acid sequence of SEQ ID NO: 479, and
[0652] 2) a single-domain antibody VL comprising the amino acid sequence of SEQ ID NO: 480.

[0653] In one embodiment, an IL-1R1 binding domain of the present invention may compete for binding the epitope with interleukin-1 receptor antagonist protein or an antibody selected from the group consisting of 1) and 2) below:
[0654] 1) interleukin-1 receptor antagonist protein (Accession no. of protein: NP_776214 (SEQ ID NO: 527), Anakinra (Amgen, SEQ ID NO: 526), and AMG108 (Amgen, H chain of SEQ ID NO: 515, 516 or 517, L chain of SEQ ID NO: 522, 523, or 524, WO2004/022718), and
[0655] 2) SEQ ID NOs: 540 to 617.

[0656] In one embodiment, an IL-1alpha and/or an IL-1beta binding domain of the present invention may compete for binding the epitope with an antibody selected from the group consisting of 1) below:

[0657] ABT-981 (AbbVie, H chain of SEQ ID NO: 512, L chain of SEQ ID NO: 519), Canakinumab (Novartis, H chain of SEQ ID NO: 513, L chain of SEQ ID NO: 520, WO2013/082282), Gevokizumab (Xoma, H chain of SEQ ID NO: 514, L chain of SEQ ID NO: 521, U.S. Pat. No. 8,551,487), and MABp1 (XBiotech, H chain of SEQ ID NO: 518, L chain of SEQ ID NO: 525, U.S. Pat. No. 8,034,337).

[0658] In the present invention, the IL-1R1 binding domain may not compete with IL-1Ra or may compete with IL-1Ra.

[0659] Whether an antigen binding domain recognizes the same epitope recognized by other molecules including the single-domain antibody VL of any one of (1) and (2) above, IL-1Ra and IL-1beta can be confirmed by the competition between the antigen binding domain and the other molecules against the epitope. Competition can be evaluated by competitive binding assays using means such as ELISA, fluorescence energy transfer method (FRET), and fluorometric microvolume assay technology (FMAT™).

[0660] The amount of the single-domain antibody VL of any one of (1) and (2), IL-1Ra and IL-1beta that are bound to an antigen indirectly correlates with the binding ability of candidate competitor antigen binding domains (test antigen binding domains) that competitively bind to the same epitope. In other words, as the amount of or the affinity of test antigen binding domains against the same epitope increases, the amount of the single-domain antibody VL of any one of (a) and (b), IL-1Ra and IL-1beta that are bound to the antigen decreases, and the amount of test antigen binding domains bound to the antigen increases. Specifically, the single-domain antibody VL of any one of (a) and (b), IL-1Ra or IL-1beta that is appropriately labeled and an antigen binding domain to be evaluated are simultaneously added to an antigen, and thus the single-domain antibody VL of any one of (a) and (b), IL-1Ra or IL-1beta that is bound to the antigen is detected using the label. The amount of the single-domain antibody VL of any one of (a) and (b), IL-1Ra or IL-1beta that is bound to the antigen can be easily determined by labeling these molecules beforehand. This label is not particularly limited, and the labeling method is selected according to the assay technique used. The labeling method includes fluorescent labeling, radiolabeling, enzymatic labeling, and such.

[0661] Also, whether the antigen binding domain directed to IL-6R recognizes the conformational epitope can be confirmed as follows: IL-6R-expressing cells are prepared for the purpose described above. The recognition of the conformational epitope by the antigen binding domain directed to IL-6R is confirmed, for example, when the antigen binding domain directed to IL-6R strongly binds to the IL-6R-expressing cells upon contact with the cells, whereas the antigen binding domain does not substantially bind to an immobilized linear peptide comprising an amino acid sequence constituting the extracellular domain of IL-6R or a denatured (using a general denaturant such as guanidine) linear peptide comprising an amino acid sequence constituting the extracellular domain of IL-6R. In this context, the term “not substantially bind” means that the binding activity is 80% or less, usually 50% or less, preferably 30% or less, particularly preferably 15% or less of binding activity against cells expressing human IL-6R.

[0662] The method for confirming the antigen binding activity of the antigen binding domain also includes a method of measuring a Kd value by, for example, radiolabeled antigen binding assay (RIA). In one embodiment, RIA is carried out using the antigen binding domain of interest and its antigen. For example, the binding affinity in a solution of the antigen binding domain for the antigen is measured by equilibrating the antigen binding domain with the smallest concentration of a (125I)-labeled antigen in the presence of a titration series of an unlabeled antigen, and subsequently capturing the bound antigen by a plate coated with the antigen binding domain (see e.g., Chen et al., J. Mol. Biol. 293: 865-881 (1999)).

[0663] According to an alternative embodiment, Kd is measured by a surface plasmon resonance method using BIACORE®. For example, assay using BIACORE®-2000 or BIACORE®-3000 (BIAcore, Inc., Piscataway, N.J.) is carried out at 25 degrees C. using a CMS chip with approximately 10 response units (RU) of the antigen immobilized thereon. In one embodiment, a carboxymethylated dextran biosensor chip (CMS, BIAcore, Inc.) is activated using N-ethyl-N-(3-dimethylaminopropyl)-carbodiimide hydrochloride (EDC) and N-hydroxysuccinimide (NHS) according to the supplier's instruction. The antigen is diluted to 5 micro g/ml (approximately 0.2 micro M) with 10 mM sodium acetate (pH 4.8) and then injected thereto at a flow rate of 5 micro 1/min so as to attain protein binding at approximately 10 response units (RU). After the antigen injection, 1 M ethanolamine is injected thereto in order to block unreacted groups. For kinetic measurement, 2-fold dilutions (0.78 nM to 500 nM) of the antigen binding domain in PBS containing 0.05% Polysorbate 20 (TWEEN-20™) as a surfactant (PBST) are injected thereto at a flow rate of approximately 25 micro 1/min at 25 degrees C. An association rate (kon) and a dissociation rate (koff) are calculated by fitting sensorgrams of association and dissociation at the same time using a simple 1:1 Langmuir binding model (BIACORE® evaluation software version 3.2). An equilibrium dissociation constant (Kd) is calculated as a koff/kon ratio. Furthermore, an apparent dissociation constant (Kd) may be determined by use of equilibrium analysis. For these procedures, see the protocol attached to BIACORE®. See, for example, Chen et al., J. Mol. Biol. 293: 865-881 (1999) and Methods Enzymol. 2000; 323: 325-40. In the surface plasmon resonance assay, the amount of the protein immobilized, the amount of the protein used in reaction, temperature, and solution composition can be variously changed by those skilled in the art. When the on-rate in the surface plasmon resonance assay described above exceeds 106 M-1s-1, the on-rate can be determined by use of a fluorescence quenching technique of using a spectrometer (e.g. a stopped-flow spectrophotometer (Aviv Instruments, Inc.) or SLM-AMINCO™ spectrophotometer 8000 series (Thermo Spectronic/Thermo Fisher Scientific Inc.) using a stirring cuvette) to measure increase or decrease in fluorescence intensity (excitation=295 nm; emission=340 nm, band path: 16 nm) at 25 degrees C. for 20 nM antigen binding domain in PBS (pH 7.2) in the presence of gradually increased concentrations of the antigen.

[0664] Furthermore, the antigen binding activity of the antigen binding domain can also be measured by a known molecule-molecule interaction measurement method such as electrogenerated chemiluminescence.

[0665] Examples of the method for measuring the binding activity of the antigen binding domain directed to IL-6R against the IL-6R-expressing cells include methods described in Antibodies: A Laboratory Manual (Ed Harlow, David Lane, Cold Spring Harbor Laboratory (1988) 359-420). Specifically, the binding activity can be evaluated on the basis of the principle of ELISA or FACS (fluorescence activated cell sorting) using the IL-6R-expressing cells as an antigen.

[0666] In the ELISA format, the binding activity of the antigen binding domain directed to IL-6R against the IL-6R-expressing cells is quantitatively evaluated by comparing the levels of signals generated through enzymatic reaction. Specifically, a test antigen binding domain is added to an ELISA plate with the IL-6R-expressing cells immobilized thereon. Then, the test antigen binding domain bound with the cells is detected through the use of an enzyme-labeled antibody recognizing the test antigen binding domain. Alternatively, in the FACS, a dilution series of a test antigen binding domain is prepared, and the antibody binding titer for the IL-6R-expressing cells can be determined to compare the binding activity of the test antigen binding domain against the IL-6R-expressing cells.

[0667] The binding of the test antigen binding domain to the antigen expressed on the surface of cells suspended in a buffer solution or the like can be detected using a flow cytometer. For example, the following apparatuses are known as the flow cytometer:
[0668] FACSCanto™ II
[0669] FACSAria™
[0670] FACSArray™
[0671] FACSVantage™ SE
[0672] FACSCalibur™ (all are trade names of BD Biosciences)
[0673] EPICS ALTRA HyPerSort
[0674] Cytomics FC 500
[0675] EPICS XL-MCL ADC EPICS XL ADC
[0676] Cell Lab Quanta/Cell Lab Quanta SC (all are trade names of Beckman Coulter, Inc.)

[0677] One preferred example of the method for measuring the antigen binding activity of the antigen binding domain directed to IL-6R includes the following method: first, IL-6R-expressing cells reacted with a test antigen binding domain are stained with a FITC-labeled secondary antibody recognizing the test antigen binding domain. The test antigen binding domain is appropriately diluted with a suitable buffer solution to prepare the antigen binding domain at the desired concentration for use. The antigen binding domain can be used, for example, at any concentration from 10 micro g/ml to 10 ng/ml. Next, fluorescence intensity and the number of cells are measured using FACSCalibur (Becton, Dickinson and Company). The amount of the antigen binding domain bound to the cells is reflected in the fluorescence intensity obtained by analysis using CELL QUEST Software (Becton, Dickinson and Company), i.e., a geometric mean value. In short, the binding activity of the test antigen binding domain indicated by the amount of the test antigen binding domain bound can be determined by obtaining the geometric mean value.

[0678] Whether the antigen binding domain directed to IL-6R shares an epitope with a certain antigen binding domain can be confirmed by the competition between these antigen binding domains for the same epitope. The competition between the antigen binding domains is detected by cross-blocking assay or the like. The cross-blocking assay is preferably, for example, competitive ELISA assay.

[0679] Specifically, in the cross-blocking assay, IL-6R protein-coated wells of a microtiter plate are preincubated in the presence or absence of a candidate competitor antigen binding domain. Then, a test antigen binding domain is added thereto. The amount of the test antigen binding domain bound with the IL-6R protein in the wells indirectly correlates with the binding capacity of the candidate competitor antigen binding domain that competes for the binding to the same epitope. In short, larger affinity of the competitor antigen binding domain for the same epitope means lower binding activity of the test antigen binding domain against the IL-6R protein-coated wells.

[0680] The amount of the test antigen binding domain bound with the wells via the IL-6R protein can be easily measured by labeling the antigen binding domain in advance. For example, a biotin-labeled antigen binding domain is assayed by using an avidin-peroxidase conjugate and an appropriate substrate. In particular, cross-blocking assay that utilizes enzyme labels such as peroxidase is called competitive ELISA assay. The antigen binding domain can be labeled with an alternative detectable or measurable labeling material. Specifically, radiolabels, fluorescent labels, and the like are known in the art.

[0681] Provided that the competitor antigen binding domain can block the binding of the antigen binding domain directed to IL-6R by at least 20%, preferably at least 20 to 50%, more preferably at least 50% as compared with binding activity obtained in a control test carried out in the absence of the candidate competitor antigen binding domain, the test antigen binding domain is determined as an antigen binding domain substantially binding to the same epitope as that for the competitor antigen binding domain, or competing for the binding to the same epitope.

[0682] When the epitope to which the antigen binding domain directed to IL-6R binds has an identified structure, whether a test antigen binding domain and a control antigen binding domain share an epitope can be evaluated by comparing the binding activity of these antigen binding domains against a peptide or a polypeptide prepared by introducing an amino acid mutation to a peptide constituting the epitope.

[0683] In such a method for measuring binding activity, for example, the binding activity of a test antigen binding domain and a control antigen binding domain against a linear peptide containing an introduced mutation can be compared in the ELISA format described above. In a method other than ELISA, the binding activity against the mutated peptide bound with a column may be measured by flowing the test antigen binding domain and the control antigen binding domain in the column, and then quantifying the antigen binding domain eluted in the eluate. A method for adsorbing a mutated peptide, for example, as a fusion peptide with GST, to a column is known in the art.

[0684] When the identified epitope is a conformational epitope, whether a test antigen binding domain and a control antigen binding domain share an epitope can be evaluated by the following method: first, IL-6R-expressing cells and cells expressing IL-6R with a mutation introduced to the epitope are prepared. The test antigen binding domain and the control antigen binding domain are added to cell suspensions containing these cells suspended in an appropriate buffer solution such as PBS. Subsequently, the cell suspensions are appropriately washed with a buffer solution, and a FITC-labeled antibody capable of recognizing the test antigen binding domain and the control antigen binding domain is then added thereto. The fluorescence intensity and the number of cells stained with the labeled antibody are measured using FACSCalibur (Becton, Dickinson and Company). The test antigen binding domain and the control antigen binding domain are appropriately diluted with a suitable buffer solution and used at concentrations thereby adjusted to the desired ones. These antigen binding domains are used, for example, at any concentration from 10 micro g/ml to 10 ng/ml. The amount of the labeled antibody bound to the cells is reflected in the fluorescence intensity obtained by analysis using CELL QUEST Software (Becton, Dickinson and Company), i.e., a geometric mean value. In short, the binding activity of the test antigen binding domain and the control antigen binding domain indicated by the amount of the labeled antibody bound can be determined by obtaining the geometric mean value.

[0685] The competition of the antigen binding domain with another antigen binding domain for the same epitope can also be confirmed by use of radiolabeled antigen binding assay (RIA), BIACORE® surface plasmon resonance assay, electrogenerated chemiluminescence, or the like, in addition to ELISA or FACS described above.

[0686] In the present method, whether to “not substantially bind to cells expressing mutated IL-6R” can be determined, for example, by the following method: first, a test antigen binding domain and a control antigen binding domain bound with the cells expressing mutated IL-6R are stained with a labeled antibody. Subsequently, the fluorescence intensity of the cells is detected. In the case of using FACSCalibur in the fluorescence detection by flow cytometry, the obtained fluorescence intensity can be analyzed using the CELL QUEST Software. From geometric mean values obtained in the presence and absence of the polypeptide associate, their comparison value (delta Geo-Mean) can be calculated according to expression 1 given below to determine the rate of increase in fluorescence intensity caused by the binding of the antigen binding domain.

Delta Geo-Mean=Geo-Mean (in the presence of the polypeptide associate)/Geo-Mean (in the absence of the polypeptide associate) (Expression 1)

[0687] The geometric mean comparison value (delta Geo-Mean value for the mutated IL-6R molecule) thus obtained by analysis, which reflects the amount of the test antigen binding domain bound with the cells expressing mutated IL-6R, is compared with the delta Geo-Mean comparison value that reflects the amount of the test antigen binding domain bound to the IL-6R-expressing cells. In this case, the concentrations of the test antigen binding domain used for determining the delta Geo-Mean comparison values for the cells expressing mutated IL-6R and the IL-6R-expressing cells are particularly preferably adjusted to equal or substantially equal concentrations. An antigen binding domain already confirmed to recognize an epitope in IL-6R is used as the control antigen binding domain.

[0688] Provided that the delta Geo-Mean comparison value of the test antigen binding domain for the cells expressing mutated IL-6R is smaller than at least 80%, preferably 50%, more preferably 30%, particularly preferably 15% of the delta Geo-Mean comparison value of the test antigen binding domain for the IL-6R-expressing cells, the test antigen binding domain “does not substantially bind to cells expressing mutate IL-6R”. The calculation expression for determining the Geo-Mean (geometric mean) value is described in the CELL QUEST Software User's Guide (BD biosciences). The epitope for the test antigen binding domain and the control antigen binding domain can be assessed as being the same when their comparison values can be regarded as being substantially equivalent as a result of comparison.

[0689] In the present specification, the term “carrying moiety” refers to a moiety other than an antigen binding domain in a polypeptide. The carrying moiety of the present invention is usually a peptide or a polypeptide constituted by amino acids. In a specific embodiment, the carrying moiety in the polypeptide is linked to the antigen binding domain via a cleavage site. The carrying moiety of the present invention may be a series of peptides or polypeptides connected through an amide bond, or may be a complex formed from a plurality of peptides or polypeptides through a covalent bond such as a disulfide bond or a noncovalent bond such as a hydrogen bond or hydrophobic interaction.

[0690] The carrying moiety of the present invention has an inhibiting domain that inhibits the antigen binding activity of the antigen binding domain. In the present specification, the term “inhibiting domain” is limited only by the inhibition of the antigen binding activity of the antigen binding domain. The inhibiting domain can be a domain having any structure as long as the domain used can inhibit the antigen binding activity of the antigen binding domain. Examples of such an inhibiting domain include, but are not limited to, an antibody heavy chain variable region (VH), an antibody light chain variable region (VL), pre-B cell receptors, and single-domain antibodies. The inhibiting domain may constitute the whole of the carrying moiety or may constitute a portion of the carrying moiety.

[0691] In some embodiments of the present invention, the antigen binding domain released from the polypeptide has higher antigen binding activity than that before the release. In other words, the antigen binding activity of the antigen binding domain is inhibited by the inhibiting domain in a state where the antigen binding domain is unreleased from the polypeptide. Whether the antigen binding activity of the antigen binding domain is inhibited by the inhibiting domain is confirmed by a method such as FACS (fluorescence activated cell sorting), ELISA (enzyme-linked immunosorbent assay), ECL (electrogenerated chemiluminescence), a SPR (surface plasmon resonance) method (Biacore), BLI (biolayer interferometry) (Octet). In some embodiments of the present invention, the antigen binding activity of the antigen binding domain released from the polypeptide is a value equal to or larger than 2 times, 3 times, 4 times, 5 times, 6 times, 7 times, 8 times, 9 times, 10 times, 20 times, 30 times, 40 times, 50 times, 60 times, 70 times, 80 times, 90 times, 100 times, 200 times, 300 times, 400 times, 500 times, 600 times, 700 times, 800 times, 900 times, 1000 times, 2000 times, or 3000 times the binding activity of the antigen binding domain unreleased from the polypeptide. In some more specific embodiments of the present invention, the binding of the antigen binding domain before the release to the antigen is not seen when the antigen binding activity of the antigen binding domain is measured by one method selected from among the methods described above.

[0692] In some aspects of the present invention, the cleavage site is cleaved so that the antigen binding domain becomes capable of being released from the polypeptide. In such aspects, therefore, the antigen binding activity can be compared between before and after the cleavage of the polypeptide. Specifically, the antigen binding activity measured using the cleaved polypeptide is a value equal to or larger than 2 times, 3 times, 4 times, 5 times, 6 times, 7 times, 8 times, 9 times, 10 times, 20 times, 30 times, 40 times, 50 times, 60 times, 70 times, 80 times, 90 times, 100 times, 200 times, 300 times, 400 times, 500 times, 600 times, 700 times, 800 times, 900 times, 1000 times, 2000 times, or 3000 times the antigen binding activity measured using the uncleaved polypeptide. In some more specific embodiments, the binding of the antigen binding domain of the uncleaved polypeptide to the antigen is not seen when the antigen binding activity is measured by one method selected from among the methods described above.

[0693] In some aspects of the present invention, the cleavage site is cleaved by protease. In such aspects, therefore, the antigen binding activity can be compared between before and after the protease treatment of the polypeptide. Specifically, the antigen binding activity measured using the polypeptide after the protease treatment is a value equal to or larger than 2 times, 3 times, 4 times, 5 times, 6 times, 7 times, 8 times, 9 times, 10 times, 20 times, 30 times, 40 times, 50 times, 60 times, 70 times, 80 times, 90 times, 100 times, 200 times, 300 times, 400 times, 500 times, 600 times, 700 times, 800 times, 900 times, 1000 times, 2000 times, or 3000 times the antigen binding activity measured using the polypeptide without the protease treatment. In some more specific embodiments, the binding of the antigen binding domain of the protease-untreated polypeptide to the antigen is not seen when the antigen binding activity is measured by one method selected from among the methods described above.

[0694] In the present invention, the polypeptide comprising an antigen binding domain and a carrying moiety has a longer half-life in blood than the half-life of the antigen binding domain that exists alone. In some embodiments of the present invention, for the longer half-life of the polypeptide, the carrying moiety is designed so as to have a longer half-life in blood. In such embodiments, examples of the approach of extending the half-life in blood of the carrying moiety include, but are not limited to, a large molecular weight of the carrying moiety, FcRn binding activity possessed by the carrying moiety, albumin binding activity possessed by the carrying moiety, and the PEGylation of the carrying moiety. In some embodiments of the present invention, the carrying moiety has a longer half-life in blood than that of the antigen binding domain (in other words, the antigen binding domain has a shorter half-life in blood than the half-life of the carrying moiety).

[0695] In one embodiment, the half-life of the antigen binding domain present with the carrying moiety in the polypeptide of the present invention in blood is 10% or more longer (i.e., 1.1 times or more longer) than that of the antigen binding domain present separated from the carrying moiety in blood. In one embodiment, the half-life of the antigen binding domain present with the carrying moiety in the polypeptide of the present invention in blood is 20% or more, 30% or more, 40% or more, 50% or more, 60% or more, 70% or more, 80% or more, 90% or more, 100% or more, 200% or more, 300% or more, 500% or more, 1000% or more, 2000% or more, 3000% or more, 4000% or more, or 5000% or more longer than that of the antigen binding domain present separated from the carrying moiety in blood. In one embodiment, the half-life of the antigen binding domain present with the carrying moiety in the polypeptide of the present invention in blood is 2 times or more, 3 times or more, 4 times or more, 5 times or more, 6 times or more, 7 times or more, 8 times or more, 9 times or more, 10 times or more, 20 times or more, 30 times or more, or 50 times or more longer than that of the antigen binding domain present separated from the carrying moiety in blood.

[0696] In the present invention, the half-lives of the antigen binding domain alone and the polypeptide, or the half-lives in blood of the antigen binding domain and the carrying moiety are preferably compared in terms of their half-lives in blood in humans. If the half-lives in blood are difficult to measure in humans, the half-lives in blood in humans can be predicted on the basis of their half-lives in blood in mice (e.g., normal mice, transgenic mice expressing a human antigen, and transgenic mice expressing human FcRn) or monkeys (e.g., cynomolgus monkeys).

[0697] In one embodiment, the approach of extending the half-life in blood of the carrying moiety includes a large molecular weight of the carrying moiety. In one embodiment, the approach of rendering the half-life in blood of the carrying moiety longer than that of the antigen binding domain includes a larger molecular weight of the carrying moiety than that of the antigen binding domain.

[0698] In one embodiment, the approach of extending the half-life in blood of the carrying moiety includes FcRn binding activity possessed by the carrying moiety. The carrying moiety can usually possess FcRn binding activity by a method of establishing an FcRn binding region in the carrying moiety. The FcRn binding region refers to a region having binding activity against FcRn and may have any structure as long as the region used has binding activity against FcRn.

[0699] The carrying moiety containing a FcRn binding region is capable of being taken up into cells and then brought back into plasma through the salvage pathway of FcRn. For example, an IgG molecule has a relatively long circulation time in plasma (slow disappearance) because FcRn known as a salvage receptor of the IgG molecule functions. An IgG molecule taken up into the endosome through pinocytosis binds to FcRn expressed in the endosome under intraendosomal acidic conditions. An IgG molecule that has failed to bind to FcRn is moved to the lysosome and degraded therein, whereas the IgG molecule bound with FcRn is transferred to cell surface, then dissociated from the FcRn under neutral conditions in plasma, and thereby brought back into plasma.

[0700] The FcRn binding region is preferably a region binding directly to FcRn. Preferred examples of the FcRn binding region can include antibody Fc regions. However, a region capable of binding to a polypeptide, such as albumin or IgG, which has FcRn binding capacity is capable of binding indirectly to FcRn via albumin, IgG, or the like. Therefore, the FcRn binding region according to the present invention may be a region binding to such a polypeptide having FcRn binding capacity.

[0701] The binding activity of the FcRn binding region according to the present invention against FcRn, particularly, human FcRn may be measured by a method known to those skilled in the art, as mentioned in the above section about binding activity. The conditions therefor may be appropriately determined by those skilled in the art. The binding activity against human FcRn can be evaluated as KD (dissociation constant), apparent KD (apparent dissociation constant), kd (dissociation rate), or apparent kd (apparent dissociation rate), etc. These values can be measured by methods known to those skilled in the art. For example, Biacore (GE Healthcare Japan Corp.), Scatchard plot, a flow cytometer, and the like can be used.

[0702] The conditions for measuring the binding activity of the FcRn binding region against FcRn are not particularly limited and may be appropriately selected by those skilled in the art. The binding activity can be measured under conditions involving, for example, a MES buffer and 37 degrees C., as described in WO2009/125825. Also, the binding activity of the FcRn binding region of the present invention against FcRn may be measured by a method known to those skilled in the art and can be measured using, for example, Biacore (GE Healthcare Japan Corp.). In the measurement of the binding activity of the FcRn binding region against FcRn, FcRn and the FcRn binding region or the carrying moiety containing the FcRn binding region can be injected as analytes to chips on which the FcRn binding region or the carrying moiety containing the FcRn binding region and FcRn, respectively, are immobilized, followed by evaluation.

[0703] As for pH for use in the measurement conditions, the binding affinity of the FcRn binding region for FcRn may be evaluated at any pH of 4.0 to 6.5. Preferably, a pH of 5.8 to 6.0, which is close to pH in the early endosome in vivo, is used for determining the binding affinity of the FcRn binding region for human FcRn. As for temperature for use in the measurement conditions, the binding affinity of the FcRn binding region for FcRn may be evaluated at any temperature of 10 degrees C. to 50 degrees C. Preferably, a temperature of 15 degrees C. to 40 degrees C. is used for determining the binding affinity of the FcRn binding region for human FcRn. More preferably, any temperature from 20 degrees C. to 35 degrees C., for example, any one of 20, 21, 22, 23, 24, 25, 26, 27, 28, 29, 30, 31, 32, 33, 34, and 35 degrees C., is also used for determining the binding affinity of the FcRn binding region for FcRn. The temperature of 25 degrees C. is one non-limiting example of the temperature of the present invention.

[0704] One example of the FcRn binding region includes, but is not limited to, an IgG antibody Fc region. In the case of using an IgG antibody Fc region, its type is not limited, and for example, IgG1, IgG2, IgG3, or IgG4 Fc region may be used. For example, a Fc region containing one sequence selected from the amino acid sequences represented by SEQ ID NOs: 21, 22, 23, and 24 may be used.

[0705] A natural IgG antibody Fc region as well as an Fc region variant having one or more amino acid substitutions may be used as long as the Fc region has FcRn binding activity.

[0706] For example, an Fc region variant containing an amino acid sequence derived from an IgG antibody Fc region by the substitution of at least one amino acid selected from EU numbering positions 237, 238, 239, 248, 250, 252, 254, 255, 256, 257, 258, 265, 270, 286, 289, 297, 298, 303, 305, 307, 308, 309, 311, 312, 314, 315, 317, 325, 332, 334, 360, 376, 380, 382, 384, 385, 386, 387, 389, 424, 428, 433, 434 and 436 by another amino acid may be used.

[0707] More specifically, an Fc region variant containing at least one amino acid substitution selected from
[0708] an amino acid substitution to substitute Gly at position 237 by Met,
[0709] an amino acid substitution to substitute Pro at position 238 by Ala,
[0710] an amino acid substitution to substitute Ser at position 239 by Lys,
[0711] an amino acid substitution to substitute Lys at position 248 by Ile,
[0712] an amino acid substitution to substitute Thr at position 250 by Ala, Phe, Ile, Met, Gln, Ser, Val, Trp, or Tyr,
[0713] an amino acid substitution to substitute Met at position 252 by Phe, Trp, or Tyr,
[0714] an amino acid substitution to substitute Ser at position 254 by Thr,
[0715] an amino acid substitution to substitute Arg at position 255 by Glu,
[0716] an amino acid substitution to substitute Thr at position 256 by Asp, Glu, or Gln,
[0717] an amino acid substitution to substitute Pro at position 257 by Ala, Gly, Ile, Leu, Met, Asn, Ser, Thr, or Val,
[0718] an amino acid substitution to substitute Glu at position 258 by His,
[0719] an amino acid substitution to substitute Asp at position 265 by Ala,
[0720] an amino acid substitution to substitute Asp at position 270 by Phe,
[0721] an amino acid substitution to substitute Asn at position 286 by Ala or Glu,
[0722] an amino acid substitution to substitute Thr at position 289 by His,
[0723] an amino acid substitution to substitute Asn at position 297 by Ala,
[0724] an amino acid substitution to substitute Ser at position 298 by Gly,
[0725] an amino acid substitution to substitute Val at position 303 by Ala,
[0726] an amino acid substitution to substitute Val at position 305 by Ala,
[0727] an amino acid substitution to substitute Thr at position 307 by Ala, Asp, Phe, Gly, His, Ile, Lys, Leu, Met, Asn, Pro, Gln, Arg, Ser, Val, Trp, or Tyr,
[0728] an amino acid substitution to substitute Val at position 308 by Ala, Phe, Ile, Leu, Met, Pro, Gln, or Thr,
[0729] an amino acid substitution to substitute Leu or Val at position 309 by Ala, Asp, Glu, Pro, or Arg,
[0730] an amino acid substitution to substitute Gln at position 311 by Ala, His, or Ile,
[0731] an amino acid substitution to substitute Asp at position 312 by Ala or His,
[0732] an amino acid substitution to substitute Leu at position 314 by Lys or Arg,
[0733] an amino acid substitution to substitute Asn at position 315 by Ala or His,
[0734] an amino acid substitution to substitute Lys at position 317 by Ala,
[0735] an amino acid substitution to substitute Asn at position 325 by Gly,
[0736] an amino acid substitution to substitute Ile at position 332 by Val,
[0737] an amino acid substitution to substitute Lys at position 334 by Leu,
[0738] an amino acid substitution to substitute Lys at position 360 by His,
[0739] an amino acid substitution to substitute Asp at position 376 by Ala,
[0740] an amino acid substitution to substitute Glu at position 380 by Ala,
[0741] an amino acid substitution to substitute Glu at position 382 by Ala,
[0742] an amino acid substitution to substitute Asn or Ser at position 384 by Ala,
[0743] an amino acid substitution to substitute Gly at position 385 by Asp or His,
[0744] an amino acid substitution to substitute Gln at position 386 by Pro,
[0745] an amino acid substitution to substitute Pro at position 387 by Glu,
[0746] an amino acid substitution to substitute Asn at position 389 by Ala or Ser,
[0747] an amino acid substitution to substitute Ser at position 424 by Ala,
[0748] an amino acid substitution to substitute Met at position 428 by Ala, Asp, Phe, Gly, His, Ile, Lys, Leu, Asn, Pro, Gln, Ser, Thr, Val, Trp, or Tyr,
[0749] an amino acid substitution to substitute His at position 433 by Lys,
[0750] an amino acid substitution to substitute Asn at position 434 by Ala, Phe, His, Ser, Trp, or Tyr, and
[0751] an amino acid substitution to substitute Tyr or Phe at position 436 by His
[0752] (all according to the EU numbering)
[0753] in an IgG antibody Fc region may be used.

[0754] From another viewpoint, a Fc region containing at least one amino acid selected from
[0755] Met as the amino acid at position 237,
[0756] Ala as the amino acid at position 238,
[0757] Lys as the amino acid at position 239,
[0758] Ile as the amino acid at position 248,
[0759] Ala, Phe, Ile, Met, Gln, Ser, Val, Trp, or Tyr as the amino acid at position 250,
[0760] Phe, Trp, or Tyr as the amino acid at position 252,
[0761] Thr as the amino acid at position 254,
[0762] Glu as the amino acid at position 255,
[0763] Asp, Glu, or Gln as the amino acid at position 256,
[0764] Ala, Gly, Ile, Leu, Met, Asn, Ser, Thr, or Val as the amino acid at position 257,
[0765] His as the amino acid at position 258,
[0766] Ala as the amino acid at position 265,
[0767] Phe as the amino acid at position 270,
[0768] Ala or Glu as the amino acid at position 286,
[0769] His as the amino acid at position 289,
[0770] Ala as the amino acid at position 297,
[0771] Gly as the amino acid at position 298,
[0772] Ala as the amino acid at position 303,
[0773] Ala as the amino acid at position 305,
[0774] Ala, Asp, Phe, Gly, His, Ile, Lys, Leu, Met, Asn, Pro, Gln, Arg, Ser, Val, Trp, or Tyr as the amino acid at position 307,
[0775] Ala, Phe, Ile, Leu, Met, Pro, Gln, or Thr as the amino acid at position 308,
[0776] Ala, Asp, Glu, Pro, or Arg as the amino acid at position 309,
[0777] Ala, His, or Ile as the amino acid at position 311,
[0778] Ala or His as the amino acid at position 312,
[0779] Lys or Arg as the amino acid at position 314,
[0780] Ala or His as the amino acid at position 315,
[0781] Ala as the amino acid at position 317,
[0782] Gly as the amino acid at position 325,
[0783] Val as the amino acid at position 332,
[0784] Leu as the amino acid at position 334,
[0785] His as the amino acid at position 360,
[0786] Ala as the amino acid at position 376,
[0787] Ala as the amino acid at position 380,
[0788] Ala as the amino acid at position 382,
[0789] Ala as the amino acid at position 384,
[0790] Asp or His as the amino acid at position 385,
[0791] Pro as the amino acid at position 386,
[0792] Glu as the amino acid at position 387,
[0793] Ala or Ser as the amino acid at position 389,
[0794] Ala as the amino acid at position 424,
[0795] Ala, Asp, Phe, Gly, His, Ile, Lys, Leu, Asn, Pro, Gln, Ser, Thr, Val, Trp, or Tyr as the amino acid at position 428,
[0796] Lys as the amino acid at position 433,
[0797] Ala, Phe, His, Ser, Trp, or Tyr as the amino acid at position 434, and
[0798] His as the amino acid at position 436
[0799] (all according to the EU numbering)
[0800] in an IgG antibody Fc region may be used.

[0801] The FcRn binding activity possessed by the carrying moiety does not mean that the antigen binding domain has no FcRn binding activity. In the embodiments in which the carrying moiety has a longer half-life in blood than the half-life of the antigen binding domain, the antigen binding domain may have no FcRn binding activity, as a matter of course, or the antigen binding domain may have FcRn binding activity as long as the FcRn binding activity is weaker than that of the carrying moiety.

[0802] In one embodiment, the method for extending the half-life in blood of the carrying moiety involves binding the carrying moiety to albumin. Since albumin does not undergo renal excretion and has FcRn binding activity, its half-life in blood is as long as 17 to 19 days (J Clin Invest. 1953 August; 32 (8): 746-768). Hence, it has been reported that a protein bound with albumin becomes bulky and capable of binding indirectly to FcRn and therefore has an increased half-life in blood (Antibodies 2015, 4 (3), 141-156).

[0803] In one embodiment, the alternative method for extending the half-life in blood of the carrying moiety involves PEGylating the carrying moiety. The PEGylation of a protein is considered to render the protein bulky and also suppress its degradation by protease in blood, thereby extending the half-life in blood of the protein (J Pharm Sci. 2008 October; 97 (10): 4167-83).

[0804] In some embodiments of the present invention, the carrying moiety contains an antibody Fc region. In a specific embodiment, the carrying moiety contains a CH2 domain and a CH3 domain of a human IgG antibody. In a specific embodiment, the carrying moiety contains a moiety spanning from human IgG1 antibody heavy chain Cys226 or Pro230 to the carboxyl terminus of the heavy chain. However, the C-terminal lysine (Lys447) or glycine-lysine (Gly446-Lys447) of the Fc region may be present or absent.

[0805] In some embodiments of the present invention, the carrying moiety contains an antibody constant region. In a more preferred embodiment, the carrying moiety contains an IgG antibody constant region. In a further preferred embodiment, the carrying moiety contains a human IgG antibody constant region.

[0806] In some embodiments of the present invention, the carrying moiety contains: a region substantially similar in structure to an antibody heavy chain constant region; and a region substantially similar in structure to an antibody light chain, connected to the region via a covalent bond such as a disulfide bond or a noncovalent bond such as a hydrogen bond or hydrophobic interaction.

[0807] In the present specification, the “polypeptide comprising an antigen binding domain and a carrying moiety” is usually a series of polypeptides connected through an amide bond, or a protein containing a plurality of polypeptides connected through an amide bond.

[0808] In some embodiments of the present invention, the antigen binding domain is capable of being released from the polypeptide, and the antigen binding domain released from the polypeptide has higher antigen binding activity. In the present specification, the term “release” refers to the mutual separation of two moieties of the polypeptide. The release of the antigen binding domain from the polypeptide can be attributed to the cancelation of the interaction between the antigen binding domain and the carrying moiety. The antigen binding activity of the antigen binding domain incorporated in the polypeptide is inhibited. Hence, the antigen binding domain released from the polypeptide can be confirmed by measuring the antigen binding activity of a subject and comparing it with the antigen binding activity of the antigen binding domain incorporated in the polypeptide.

[0809] In some embodiments, the polypeptide comprises a cleavage site, and the cleavage site is cleaved so that the antigen binding domain is released from the polypeptide. The cleavage site can be cleaved by, for example, an enzyme, can be reduced with a reducing agent, or can be photodegraded. The cleavage site may be placed at any position in the polypeptide as long as the antigen binding domain can be released and does not lose its antigen binding activity after the release. The polypeptide may further contain an additional cleavage site other than the cleavage site for the release of the antigen binding domain. In one embodiment of the present invention, the cleavage site comprises a protease cleavage sequence and can be cleaved by protease.

[0810] In the present specification, the term “cleaved” refers to a state where the antigen binding domain and the carrying moiety are separated from each other after alteration of the cleavage site by protease, reduction of a cysteine-cysteine disulfide bond at the cleavage site, and/or photoactivation. In the present specification, the term “uncleaved” refers to a state where the antigen binding domain is linked to the carrying moiety in the absence of the protease cleavage of the cleavage site, in the absence of the reduction of a cysteine-cysteine disulfide bond at the cleavage site, and/or in the absence of light.

[0811] The cleavage of the cleavage site can be detected by subjecting a solution containing the cleavage site-containing polypeptide to SDS-PAGE (polyacrylamide gel electrophoresis) and measuring the molecular weights of the fragments or detecting change in molecular weight between before and after the cleavage.

[0812] The cleavage site can be specifically modified (cleaved, reduced or photodegraded) by an agent (i.e., protease, a reducing agent, or light) at a rate of approximately 0.001 to 1500×104 M-1S-1 or at least 0.001, 0.005, 0.01, 0.05, 0.1, 0.5, 1, 2.5, 5, 7.5, 10, 15, 20, 25, 50, 75, 100, 125, 150, 200, 250, 500, 750, 1000, 1250, or 1500×104 M-1S-1.

[0813] The specific cleavage by protease is performed by the contact between the protease and the cleavage site or a molecule containing the cleavage site. The cleavage site can be cleaved in the presence of sufficient enzyme activity. The sufficient enzyme activity can refer to the ability of the enzyme to bring about cleavage upon contact with the cleavage site.

[0814] In the present specification, the term “protease” refers to an enzyme such as endopeptidase or exopeptidase which hydrolyzes a peptide bond, typically, endopeptidase. The protease used in the present invention is limited only by being capable of cleaving the protease cleavage sequence and is not particularly limited by its type. In some embodiments, target tissue specific protease is used. The target tissue specific protease can refer to, for example, any of
[0815] (1) protease that is expressed at a higher level in the target tissue than in normal tissues,
[0816] (2) protease that has higher activity in the target tissue than in normal tissues,
[0817] (3) protease that is expressed at a higher level in the target cells than in normal cells, and
[0818] (4) protease that has higher activity in the target cells than in normal cells.

[0819] In a more specific embodiment, a cancer tissue specific protease or an inflammatory tissue specific protease is used.

[0820] In the present specification, the term “target tissue” means a tissue containing at least one target cell. In some embodiments of the present invention, the target tissue is a cancer tissue. In some embodiments of the present invention, the target tissue is an inflammatory tissue.

[0821] The term “cancer tissue” means a tissue containing at least one cancer cell. Thus, considering that, for example, the cancer tissue contains cancer cells and vascular vessels, every cell type that contributes to the formation of tumor mass containing cancer cells and endothelial cells is included in the scope of the present invention. In the present specification, the tumor mass refers to a foci of tumor tissue. The term “tumor” is generally used to mean benign neoplasm or malignant neoplasm.

[0822] In the present specification, examples of the “inflammatory tissue” include the following:
[0823] a joint tissue in rheumatoid arthritis or osteoarthritis,
[0824] a lung (alveolus) tissue in bronchial asthma or COPD,
[0825] a digestive organ tissue in inflammatory bowel disease, Crohn disease, or ulcerative colitis,
[0826] a fibrotic tissue in fibrosis in the liver, the kidney, or the lung,
[0827] a tissue under rejection of organ transplantation,
[0828] a vascular vessel or heart (cardiac muscle) tissue in arteriosclerosis or heart failure,
[0829] a visceral fat tissue in metabolic syndrome,
[0830] a skin tissue in atopic dermatitis and other dermatitides, and
[0831] a spinal nerve tissue in disk herniation or chronic lumbago.

[0832] Specifically expressed or specifically activated protease, or protease considered to be related to the disease condition of a target tissue (target tissue specific protease) is known for some types of target tissues. For example, International Publication Nos. WO2013/128194, WO2010/081173, and WO2009/025846 disclose protease specifically expressed in a cancer tissue. Also, J Inflamm (Lond). 2010; 7: 45, Nat Rev Immunol. 2006 July; 6 (7): 541-50, Nat Rev Drug Discov. 2014 December; 13 (12): 904-27, Respir Res. 2016 Mar. 4; 17: 23, Dis Model Mech. 2014 February; 7 (2): 193-203, and Biochim Biophys Acta. 2012 January; 1824 (1): 133-45 disclose protease considered to be related to inflammation.

[0833] In addition to the protease specifically expressed in a target tissue, there also exists protease specifically activated in a target tissue. For example, protease may be expressed in an inactive form and then converted to an active form. Many tissues contain a substance inhibiting active protease and control the activity by the process of activation and the presence of the inhibitor (Nat Rev Cancer. 2003 July; 3 (7): 489-501). In a target tissue, the active protease may be specifically activated by escaping inhibition.

[0834] The active protease can be measured by use of a method using an antibody recognizing the active protease (PNAS 2013 Jan. 2; 110 (1): 93-98) or a method of fluorescently labeling a peptide recognizable by protease so that the fluorescence is quenched before cleavage, but emitted after cleavage (Nat Rev Drug Discov. 2010 September; 9 (9): 690-701. doi: 10.1038/nrd3053).

[0835] From one viewpoint, the term “target tissue specific protease” can refer to any of
[0836] (i) protease that is expressed at a higher level in the target tissue than in normal tissues,
[0837] (ii) protease that has higher activity in the target tissue than in normal tissues,
[0838] (iii) protease that is expressed at a higher level in the target cells than in normal cells, and
[0839] (iv) protease that has higher activity in the target cells than in normal cells.

[0840] Specific examples of the protease include, but are not limited to, cysteine protease (including cathepsin families B, L, S, etc.), aspartyl protease (cathepsins D, E, K, O, etc.), serine protease (including matriptase (including MT-SP1), cathepsins A and G, thrombin, plasmin, urokinase (uPA), tissue plasminogen activator (tPA), elastase, proteinase 3, thrombin, kallikrein, tryptase, and chymase), metalloproteinase (metalloproteinase (MMP1-28) including both membrane-bound forms (MMP14-17 and MMP24-25) and secreted forms (MMP1-13, MMP18-23 and MMP26-28), A disintegrin and metalloproteinase (ADAM), specifically ADAM17, A disintegrin and metalloproteinase with thrombospondin motifs (ADAMTSs (ADAMTS1, ADAMTS2, ADAMTS3, ADAMTS4, ADAMTS5, ADAMTS6, ADAMTS7, ADAMTS8, ADAMTS9, ADAMTS10, ADAMTS12, ADAMTS13, ADAMTS14, ADAMTS15, ADAMTS16, ADAMTS17, ADAMTS18, ADAMTS19 and ADAMTS20)), meprin (meprin alpha and meprin beta), CD10 (CALLA), prostate-specific antigen (PSA), legumain, TMPRSS3, TMPRSS4, human neutrophil elastase (HNE), beta secretase (BACE), fibroblast activation protein alpha (FAP), granzyme B, guanidinobenzoatase (GB), hepsin, neprilysin, NS3/4A, HCV-NS3/4, calpain, ADAMDEC1, renin, cathepsin C, cathepsin V/L2, cathepsin X/Z/P, cruzipain, otubain 2, kallikrein-related peptidases (KLKs (KLK3, KLK4, KLK5, KLK6, KLK7, KLK8, KLK10, KLK11, KLK13, and KLK14)), bone morphogenetic protein 1 (BMP-1), activated protein C, blood coagulation-related protease (Factor VIIa, Factor IXa, Factor Xa, Factor XIa, and Factor XIIa), HtrA1, lactoferrin, marapsin, PACE4, DESC1, dipeptidyl peptidase 4 (DPP-4), TMPRSS2, cathepsin F, cathepsin H, cathepsin L2, cathepsin O, cathepsin S, granzyme A, Gepsin calpain 2, glutamate carboxypeptidase 2, AMSH-like proteases, AMSH, gamma secretase, antiplasmin cleaving enzyme (APCE), decysin 1, N-acetylated alpha-linked acidic dipeptidase-like 1 (NAALADL1), and furin.

[0841] From another viewpoint, the target tissue specific protease can refer to a cancer tissue specific protease or an inflammatory tissue specific protease.

[0842] Examples of cancer tissue specific protease include protease specifically expressed in a cancer tissue disclosed in International Publication Nos. WO2013/128194, WO2010/081173, and WO2009/025846.

[0843] As for the type of cancer tissue specific protease, the protease having higher expression specificity in the cancer tissue to be treated is more effective for reducing adverse reactions. Preferable cancer tissue specific protease has a concentration in the cancer tissue at least 5 times, more preferably at least 10 times, further preferably at least 100 times, particularly preferably at least 500 times, most preferably at least 1000 times higher than its concentration in normal tissues. Also, preferable cancer tissue specific protease has activity in the cancer tissue at least 2 times, more preferably at least 3 times, at least 4 times, at least 5 times, or at least 10 times, further preferably at least 100 times, particularly preferably at least 500 times, most preferably at least 1000 times higher than its activity in normal tissues.

[0844] The cancer tissue specific protease may be in a form bound with a cancer cell membrane or may be in a form secreted extracellularly without being bound with a cell membrane. When the cancer tissue specific protease is not bound with a cancer cell membrane, it is preferred for immunocyte-mediated cytotoxicity specific for cancer cells that the cancer tissue specific protease should exist within or in the vicinity of the cancer tissue. In the present specification, the “vicinity of the cancer tissue” means to fall within the scope of location where the protease cleavage sequence specific for the cancer tissue is cleaved so that the antigen binding domain exerts antigen binding activity. However, it is preferred that damage on normal cells should be minimized in this scope of location.

[0845] From an alternative viewpoint, cancer tissue specific protease is any of
[0846] (i) protease that is expressed at a higher level in the cancer tissue than in normal tissues,
[0847] (ii) protease that has higher activity in the cancer tissue than in normal tissues,
[0848] (iii) protease that is expressed at a higher level in the cancer cells than in normal cells, and
[0849] (iv) protease that has higher activity in the cancer cells than in normal cells.

[0850] One type of cancer tissue specific protease may be used alone, or two or more types of cancer tissue specific proteases may be combined. The number of types of cancer tissue specific protease can be appropriately set by those skilled in the art in consideration of the cancer type to be treated.

[0851] From these viewpoints, cancer tissue specific protease is preferably serine protease or metalloproteinase, more preferably matriptase (including MT-SP1), urokinase (uPA), or metalloproteinase, further preferably MT-SP1, uPA, MMP2, or MMP9, among the proteases listed above.

[0852] As for the type of inflammatory tissue specific protease, the protease having higher expression specificity in the inflammatory tissue to be treated is more effective for reducing adverse reactions. Preferable inflammatory tissue specific protease has a concentration in the inflammatory tissue at least 5 times, more preferably at least 10 times, further preferably at least 100 times, particularly preferably at least 500 times, most preferably at least 1000 times higher than its concentration in normal tissues. Also, preferable inflammatory tissue specific protease has activity in the inflammatory tissues at least 2 times, more preferably at least 3 times, at least 4 times, at least 5 times, or at least 10 times, further preferably at least 100 times, particularly preferably at least 500 times, most preferably at least 1000 times higher than its activity in normal tissues.

[0853] The inflammatory tissue specific protease may be in a form bound with an inflammatory cell membrane or may be in a form secreted extracellularly without being bound with a cell membrane. When the inflammatory tissue specific protease is not bound with an inflammatory cell membrane, it is preferred for immunocyte-mediated cytotoxicity specific for inflammatory cells that the inflammatory tissue specific protease should exist within or in the vicinity of the inflammatory tissue. In the present specification, the “vicinity of the inflammatory tissue” means to fall within the scope of location where the protease cleavage sequence specific for the inflammatory tissue is cleaved so that the antigen binding domain exerts antigen binding activity. However, it is preferred that damage on normal cells should be minimized in this scope of location.

[0854] From an alternative viewpoint, inflammatory tissue specific protease is any of
[0855] (i) protease that is expressed at a higher level in the inflammatory tissue than in normal tissues,
[0856] (ii) protease that has higher activity in the inflammatory tissue than in normal tissues,
[0857] (iii) protease that is expressed at a higher level in the inflammatory cells than in normal cells, and
[0858] (iv) protease that has higher activity in the inflammatory cells than in normal cells.

[0859] One type of inflammatory tissue specific protease may be used alone, or two or more types of inflammatory tissue specific proteases may be combined. The number of types of inflammatory tissue specific protease can be appropriately set by those skilled in the art in consideration of the pathological condition to be treated.

[0860] From these viewpoints, t inflammatory tissue specific protease is preferably metalloproteinase among the proteases listed above. The metalloproteinase is more preferably ADAMTS4, ADAMTS5, ADAM17, MMP1, MMP2, MMP3, MMP7, MMP9, MMP13, MMP14, or MMP17.

[0861] The protease cleavage sequence is a particular amino acid sequence that is specifically recognized by target tissue specific protease when the polypeptide is hydrolyzed by the target tissue specific protease in an aqueous solution.

[0862] The protease cleavage sequence is preferably an amino acid sequence that is hydrolyzed with high specificity by target tissue specific protease more specifically expressed in the target tissue or cells to be treated or more specifically activated in the target tissue/cells to be treated, from the viewpoint of reduction in adverse reactions.

[0863] Specific examples of the protease cleavage sequence include target sequences that are specifically hydrolyzed by the above-listed protease specifically expressed in a cancer tissue disclosed in International Publication Nos. WO2013/128194, WO2010/081173, and WO2009/025846, the protease specific for an inflammatory tissue, and the like. A sequence artificially altered by, for example, introducing an appropriate amino acid mutation to a target sequence that is specifically hydrolyzed by known protease can also be used. Alternatively, a protease cleavage sequence identified by a method known to those skilled in the art as described in Nature Biotechnology 19, 661-667 (2001) may be used.

[0864] Furthermore, a naturally occurring protease cleavage sequence may be used. For example, TGFbeta is converted to a latent form by protease cleavage. Likewise, a protease cleavage sequence in a protein that changes its molecular form by protease cleavage can also be used.

[0865] Examples of the protease cleavage sequence that can be used include, but are not limited to, sequences disclosed in International Publication No. WO2015/116933, International Publication No. WO2015/048329, International Publication No. WO2016/118629, International Publication No. WO2016/179257, International Publication No. WO2016/179285, International Publication No. WO2016/179335, International Publication No. WO2016/179003, International Publication No. WO2016/046778, International Publication No. WO2016/014974, U.S. Patent Publication No. US2016/0289324, U.S. Patent Publication No. US2016/0311903, PNAS (2000) 97: 7754-7759, Biochemical Journal (2010) 426: 219-228, and Beilstein J Nanotechnol. (2016) 7: 364-373.

[0866] The protease cleavage sequence is more preferably an amino acid sequence that is specifically hydrolyzed by suitable target tissue specific protease as mentioned above. The amino acid sequence that is specifically hydrolyzed by target tissue specific protease is preferably a sequence comprising any of the following amino acid sequences:

(SEQ ID NO: 12, cleavable by MT-SP1 or uPA)
LSGRSDNH
(SEQ ID NO: 25, cleavable by MMP2 or MMP9)
PLALAG,
and
(SEQ ID NO: 26, cleavable by MMP7)
VPLSLTMG.

[0867] Any of the following sequences can also be used as the protease cleavage sequence:

(SEQ ID NO: 74, cleavable by MT-SP1 or uPA)
TSTSGRSANPRG,
(SEQ ID NO: 75, cleavable by MT-SP1 or uPA)
ISSGLLSGRSDNH,
(SEQ ID NO: 76, cleavable by MT-SP1 or uPA)
AVGLLAPPGGLSGRSDNH,
(SEQ ID NO: 77, cleavable by MMP1)
GAGVPMSMRGGAG,
(SEQ ID NO: 78, cleavable by MMP2)
GAGIPVSLRSGAG,
(SEQ ID NO: 79, cleavable by MMP2)
GPLGIAGQ,
(SEQ ID NO: 80, cleavable by MMP2)
GGPLGMLSQS,
(SEQ ID NO: 81, cleavable by MMP2)
PLGLWA,
(SEQ ID NO: 82, cleavable by MMP3)
GAGRPFSMIMGAG,
(SEQ ID NO: 83, cleavable by MMP7)
GAGVPLSLTMGAG,
(SEQ ID NO: 84, cleavable by MMP9)
GAGVPLSLYSGAG,
(SEQ ID NO: 85, cleavable by MMP11)
AANLRN,
(SEQ ID NO: 86, cleavable by MMP11)
AQAYVK,
(SEQ ID NO: 87, cleavable by MMP11)
AANYMR,
(SEQ ID NO: 88, cleavable by MMP11)
AAALTR,
(SEQ ID NO: 89, cleavable by MMP11)
AQNLMR,
(SEQ ID NO: 90, cleavable by MMP11)
AANYTK,
(SEQ ID NO: 91, cleavable by MMP13)
GAGPQGLAGQRGIVAG,
(SEQ ID NO: 92, cleavable by pro-urokinase)
PRFKIIGG
(SEQ ID NO: 93, cleavable by pro-urokinase)
PRFRIIGG
(SEQ ID NO: 94, cleavable by uPA)
GAGSGRSAG,
(SEQ ID NO: 95, cleavable by uPA)
SGRSA
(SEQ ID NO: 96, cleavable by uPA)
GSGRSA,
(SEQ ID NO: 97, cleavable by uPA)
SGKSA
(SEQ ID NO: 98, cleavable by uPA)
SGRSS,
(SEQ ID NO: 99, cleavable by uPA)
SGRRA,
(SEQ ID NO: 100, cleavable by uPA)
SGRNA,
(SEQ ID NO: 101, cleavable by uPA)
SGRKA,
(SEQ ID NO: 102, cleavable by tPA)
QRGRSA,
(SEQ ID NO: 103, cleavable by cathepsin B)
GAGSLLKSRMVPNFNAG,
(SEQ ID NO: 104, cleavable by cathepsin B)
TQGAAA,
(SEQ ID NO: 105, cleavable by cathepsin B)
GAAAAA,
(SEQ ID NO: 106, cleavable by cathepsin B)
GAGAAG,
(SEQ ID NO: 107, cleavable by cathepsin B)
AAAAAG,
(SEQ ID NO: 108, cleavable by cathepsin B)
LCGAAI,
(SEQ ID NO: 109, cleavable by cathepsin B)
FAQALG,
(SEQ ID NO: 110, cleavable by cathepsin B)
LLQANP,
(SEQ ID NO: 111, cleavable by cathepsin B)
LAAANP,
(SEQ ID NO: 112, cleavable by cathepsin B)
LYGAQF,
(SEQ ID NO: 113, cleavable by cathepsin B)
LSQAQG,
(SEQ ID NO: 114, cleavable by cathepsin B)
ASAASG,
(SEQ ID NO: 115, cleavable by cathepsin B)
FLGASL,
(SEQ ID NO: 116, cleavable by cathepsin B)
AYGATG,
(SEQ ID NO: 117, cleavable by cathepsin B)
LAQATG,
(SEQ ID NO: 118, cleavable by cathepsin L)
GAGSGVVIATVIVITAG,
(SEQ ID NO: 119, cleavable by meprin alpha or meprin beta)
APMAEGGG,
(SEQ ID NO: 120, cleavable by meprin alpha or meprin beta)
EAQGDKII,
(SEQ ID NO: 121, cleavable by meprin alpha or meprin beta)
LAFSDAGP,
(SEQ ID NO: 122, cleavable by meprin alpha or meprin beta)
YVADAPK,
(SEQ ID NO: 123, cleavable by furin)
RRRRR,
(SEQ ID NO: 124, cleavable by furin)
RRRRRR,
(SEQ ID NO: 125, cleavable by furin)
GQSSRHRRAL,
(SEQ ID NO: 126)
SSRHRRALD,
(SEQ ID NO: 127, cleavable by plasminogen)
RKSSIIIRMRDVVL,
(SEQ ID NO: 128, cleavable by staphylokinase)
SSSFDKGKYKKGDDA,
(SEQ ID NO: 129, cleavable by staphylokinase)
SSSFDKGKYKRGDDA,
(SEQ ID NO: 130, cleavable by Factor Xa)
IEGR,
(SEQ ID NO: 131, cleavable by Factor Xa)
IDGR,
(SEQ ID NO: 132, cleavable by Factor Xa)
GGSIDGR,
(SEQ ID NO: 133, cleavable by collagenase)
GPQGIAGQ,
(SEQ ID NO: 134, cleavable by collagenase)
GPQGLLGA,
(SEQ ID NO: 135, cleavable by collagenase)
GIAGQ,
(SEQ ID NO: 136, cleavable by collagenase)
GPLGIAG,
(SEQ ID NO: 137, cleavable by collagenase)
GPEGLRVG,
(SEQ ID NO: 138, cleavable by collagenase)
YGAGLGVV,
(SEQ ID NO: 139, cleavable by collagenase)
AGLGVVER,
(SEQ ID NO: 140, cleavable by collagenase)
AGLGISST,
(SEQ ID NO: 141, cleavable by collagenase)
EPQALAMS,
(SEQ ID NO: 142, cleavable by collagenase)
QALAMSAI,
(SEQ ID NO: 143, cleavable by collagenase)
AAYHLVSQ,
(SEQ ID NO: 144, cleavable by collagenase)
MDAFLESS,
(SEQ ID NO: 145, cleavable by collagenase)
ESLPVVAV,
(SEQ ID NO: 146, cleavable by collagenase)
SAPAVESE,
(SEQ ID NO: 147, cleavable by collagenase)
DVAQFVLT,
(SEQ ID NO: 148, cleavable by collagenase)
VAQFVLTE,
(SEQ ID NO: 149, cleavable by collagenase)
AQFVLTEG,
(SEQ ID NO: 150, cleavable by collagenase)
PVQPIGPQ,
(SEQ ID NO: 151, cleavable by thrombin)
LVPRGS,
(SEQ ID NO: 178, cleavable by uPA or MT-SP1)
TSTSGRSANPRG,
and
(SEQ ID NO: 509, cleavable by MMP13)
GPPGPQGLAGQRGIVGL.

[0868] In one embodiment of the present invention, a flexible linker is further attached to either one end or both ends of the protease cleavage sequence. The flexible linker at one end of the protease cleavage sequence can be referred to as a first flexible linker, and the flexible linker at the other end can be referred to as a second flexible linker. In a particular embodiment, the protease cleavage sequence and the flexible linker have any of the following formulas:

(protease cleavage sequence),

(first flexible linker)−(protease cleavage sequence),

(protease cleavage sequence)−(second flexible linker), and

(first flexible linker)−(protease cleavage sequence)−(second flexible linker).

[0869] The flexible linker according to the present embodiment is preferably a peptide linker. The first flexible linker and the second flexible linker each independently and arbitrarily exist and are identical or different flexible linkers each containing at least one flexible amino acid (Gly, etc.). The flexible linker contains, for example, a sufficient number of residues (amino acids arbitrarily selected from Arg, Ile, Gln, Glu, Cys, Tyr, Trp, Thr, Val, His, Phe, Pro, Met, Lys, Gly, Ser, Asp, Asn, Ala, etc., particularly Gly, Ser, Asp, Asn, and Ala, in particular, Gly and Ser, especially Gly, etc.) for the protease cleavage sequence to obtain the desired protease accessibility.

[0870] The flexible linker suable for use at both ends of the protease cleavage sequence is usually a flexible linker that improves the access of protease to the protease cleavage sequence and elevates the cleavage efficiency of the protease. A suitable flexible linker may be readily selected and can be preferably selected from among different lengths such as 1 amino acid (Gly, etc.) to 20 amino acids, 2 amino acids to 15 amino acids, or 3 amino acids to 12 amino acids including 4 amino acids to 10 amino acids, 5 amino acids to 9 amino acids, 6 amino acids to 8 amino acids, or 7 amino acids to 8 amino acids. In some embodiments of the present invention, the flexible linker is a peptide linker of 1 to 7 amino acids.

[0871] Examples of the flexible linker include, but are not limited to, glycine polymers (G)n, glycine-serine polymers (including e.g., (GS)n, (GSGGS: SEQ ID NO: 27)n and (GGGS: SEQ ID NO: 28)n, wherein n is an integer of at least 1), glycine-alanine polymers, alanine-serine polymers, and other flexible linkers well known in conventional techniques.

[0872] Among them, glycine and glycine-serine polymers are receiving attention because these amino acids are relatively unstructured and easily function as neutral tethers between components.

[0873] Examples of the flexible linker consisting of the glycine-serine polymer include, but are not limited to,

Ser (S)
Gly Ser (GS)
Ser Gly (SG)
Gly Gly Ser (GGS)
Gly Ser Gly (GSG)
Ser Gly Gly (SGG)
Gly Ser Ser (GSS)
Ser Ser Gly (SSG)
Ser Gly Ser (SGS)
Gly Gly Gly Ser (GGGS, SEQ ID NO: 28)
Gly Gly Ser Gly (GGSG, SEQ ID NO: 29)
Gly Ser Gly Gly (GSGG, SEQ ID NO: 46)
Ser Gly Gly Gly (SGGG, SEQ ID NO: 47)
Gly Ser Ser Gly (GSSG, SEQ ID NO: 48)
Gly Gly Gly Gly Ser (GGGGS, SEQ ID NO: 49)
Gly Gly Gly Ser Gly (GGGSG, SEQ ID NO: 33)
Gly Gly Ser Gly Gly (GGSGG, SEQ ID NO: 30)
Gly Ser Gly Gly Gly (GSGGG, SEQ ID NO: 32)
Gly Ser Gly Gly Ser (GSGGS, SEQ ID NO: 27)
Ser Gly Gly Gly Gly (SGGGG, SEQ ID NO: 51)
Gly Ser Ser Gly Gly (GSSGG, SEQ ID NO: 52)
Gly Ser Gly Ser Gly (GSGSG, SEQ ID NO: 31)
Ser Gly Gly Ser Gly (SGGSG, SEQ ID NO: 53)
Gly Ser Ser Ser Gly (GSSSG, SEQ ID NO: 34)
Gly Gly Gly Gly Gly Ser (GGGGGS, SEQ ID NO: 50)
Ser Gly Gly Gly Gly Gly (SGGGGG, SEQ ID NO: 54)
Gly Gly Gly Gly Gly Gly Ser
(GGGGGGS, SEQ ID NO: 55)
Ser Gly Gly Gly Gly Gly Gly
(SGGGGGG, SEQ ID NO: 56)
(Gly Gly Gly Gly Ser (GGGGS, SEQ ID NO: 49))n
(Ser Gly Gly Gly Gly (SGGGG, SEQ ID NO: 51))n

[0874] In the present specification, the “association” can refer to, for example, a state where two or more polypeptide regions interact with each other. In general, a hydrophobic bond, a hydrogen bond, an ionic bond, or the like is formed between the intended polypeptide regions to form an associate. As one example of common association, an antibody typified by a natural antibody is known to retain a paired structure of a heavy chain variable region (VH) and a light chain variable region (VL) through a noncovalent bond or the like therebetween.

[0875] In some embodiments of the present invention, the inhibiting domain of the carrying moiety associates with the antigen binding domain. The inhibiting domain may constitute a portion of the carrying moiety or may constitute the whole of the carrying moiety. From another viewpoint, the inhibiting domain can also be defined as a moiety associating with the antigen binding domain, in the carrying moiety.

[0876] In a more specific embodiment, the antigen binding domain and the inhibiting domain which is VL, VH or VHH form association as found between antibody VH and antibody VL, or association between antibody VH or antibody VH, or between antibody VL and antibody VL. In a further specific embodiment, the antigen binding domain and the inhibiting domain which is VL, VH or VHH form association as found between antibody VH and antibody VL, and in a state of the association thus formed, the inhibiting domain conformationally inhibits the binding of the antigen binding domain to the antigen or conformationally changes the antigen binding site of the antigen binding domain so that the antigen binding activity of the antigen binding domain is inhibited by the VL, the VH or the VHH. In an embodiment using VHH as the antigen binding domain, it is considered that the binding of the VHH to the antigen is conformationally inhibited by the inhibiting domain when CDR3, a main antigen binding site of the VHH, or its neighboring site exists at the interface of association with the inhibiting domain.

[0877] The association of the antigen binding domain with the inhibiting domain may be canceled, for example, by cleaving the cleavage site. The cancelation of the association can be used interchangeably with, for example, the cancelation of the state where two or more polypeptide regions interact with each other. The interaction between the two or more polypeptide regions may be wholly canceled, or the interaction between the two or more polypeptide regions may be partially canceled.

[0878] In the present specification, the “interface” usually refers to a face at which two regions associate or interact with each other Amino acid residues forming the interface are usually one or more amino acid residues contained in each polypeptide region subjected to the association and more preferably refer to amino acid residues that approach each other upon association and participate in interaction. Specifically, the interaction includes a noncovalent bond such as a hydrogen bond, electrostatic interaction, or salt bridge formation between the amino acid residues approaching each other upon association.

[0879] In the present specification, the “amino acid residues forming the interface” specifically refers to amino acid residues contained in polypeptide regions constituting the interface. As one example, the polypeptide regions constituting the interface refer to polypeptide regions responsible for intramolecular or intermolecular selective binding in antibodies, ligands, antagonists, receptors, substrates, etc. Specific examples of such polypeptide regions in antibodies can include a heavy chain variable region and a light chain variable region. In some embodiments of the present invention, examples of such polypeptide regions can include an antigen binding domain and an inhibiting domain.

[0880] Examples of the amino acid residues forming the interface include, but are not limited to, amino acid residues approaching each other upon association. The amino acid residues approaching each other upon association can be found, for example, by analyzing the conformations of polypeptides and examining the amino acid sequences of polypeptide regions forming the interface upon association of the polypeptides.

[0881] In some embodiments of the present invention, an amino acid residue involved in association in the antigen binding domain, or an amino acid residue involved in association in the inhibiting domain can be altered in order to promote the association of the antigen binding domain with the inhibiting domain. In a further specific embodiment, an amino acid residue forming the interface with the inhibiting domain, in the antigen binding domain, or an amino acid residue forming the interface with the antigen binding domain, in the inhibiting domain can be altered. In a preferred embodiment, the amino acid residue forming the interface can be altered by a method of introducing a mutation to the interface amino acid residue such that two or more amino acid residues forming the interface have different charges. The alteration of the amino acid residue to result in different charges includes the alteration of a positively charged amino acid residue to a negatively charged amino acid residue or an uncharged amino acid residue, the alteration of a negatively charged amino acid residue to a positively charged amino acid residue or an uncharged amino acid residue, and the alteration of an uncharged amino acid residue to a positively or negatively charged amino acid residue. Such an amino acid alteration is performed for the purpose of promoting the association and is not limited by the position of the amino acid alteration or the type of the amino acid as long as the purpose of promoting the association can be achieved. Examples of the alteration include, but are not limited to, substitution.

[0882] In some embodiments of the present invention, VHH serving as the antigen binding domain associates with VL serving as the inhibiting domain. The amino acid residue involved in association with VL, in VHH can refer to, for example, an amino acid residue forming the interface between the VHH and the VL. Examples of the amino acid residue involved in association with VL, in VHH include, but are not limited to, amino acid residues at positions 37, 44, 45, and 47 (J. Mol. Biol. (2005) 350, 112-125). The activity of the VHH is inhibited by promoting the association between the VHH and the VL. Likewise, the amino acid residue involved in association with VHH, in VL can refer to, for example, an amino acid residue forming the interface between the VHH and the VL.

[0883] An amino acid residue involved in association with VL, in VHH can be altered in order to promote the association between the VHH and the VL. Examples of such an amino acid substitution include, but are not limited to, F37V, Y37V, E44G, Q44G, R45L, H45L, G47W, F47W, L47W, T47W, or/and S47W. Instead of altering each residue in VHH, VHH originally having an amino acid residue 37V, 44G, 45L, or/and 47W may be used.

[0884] Instead of the VHH amino acid, an amino acid residue involved in association with VHH, in VL may be altered, and amino acid alterations may also be introduced to both VHH and VL, as long as the purpose of promoting the association between the VHH and the VL can be achieved.

[0885] In some embodiments of the present invention, VHH or VH serving as the antigen binding domain associates with VL serving as the inhibiting domain. The amino acid residue involved in association with VL, in VHH or VH can refer to, for example, an amino acid residue forming the interface between the VHH or VH and the VL, and an amino acid residue forming the interface between the CH1 and CL. Examples of the amino acid residue involved in association with VL, in VHH or VH and VL and CH1 and CL include, but are not limited to, amino acid residues at the following combinations position:

| VH | CH1 | VL | CL |
|---|---|---|---|
| 39K, 62E | H172A, F174G | 1R, 38D, (36F) | L135Y, S176W |
| 39Y | — | 38R | — |
| | T192E | | N137K, S114A |
| | L143Q, S188V | | V133T, S176V |
| | F126C | | S121C |
| 39E | — | 38K | — |
| 39K | — | 38E | — |
| V37F, L45W | — | Y87A, F98M | — |

[0886] As for enhancement of association between VH and VL several mutations have been reported in Nature Biotechnology volume 32, pages 191-198 (2014), Biophys. J. 75, 1473-1482 (1998), Protein Eng. Des. Sel. 23, 667-677 (2010), MAbs. 2017 February-March; 9(2): 182-212 and WO2013065708.

[0887] The activity of the VHH or VL is inhibited by promoting the association between the VHH or VH and the VL.

[0888] In some alternative embodiments of the present invention, the antigen binding domain and the inhibiting domain can be associated with each other by using VHH as the antigen binding domain and using VH or VHH as the inhibiting domain. An amino acid residue involved in association with VH or VHH serving as the inhibiting domain, in VHH serving as the antigen binding domain can be identified and altered in order to promote the association of the antigen binding domain VHH with the inhibiting domain VH or VHH. Also, an amino acid residue involved in association with VHH serving as the antigen binding domain, in VH or VHH serving as the inhibiting domain, can be identified and altered.

[0889] In the case of using an antigen binding domain other than VHH, an amino acid residue involved in association, in the antigen binding domain or the inhibiting domain can also be identified and altered similarly to above.

[0890] In some embodiments of the present invention, the carrying moiety and the antigen binding domain are fused via a linker. In a more specific embodiment, the carrying moiety and the antigen binding domain are fused via a linker containing a cleavage site. In an alternative specific embodiment, the carrying moiety and the antigen binding domain are fused via a linker, and the fusion protein thus formed contains a cleavage site.

[0891] In another embodiment of the present invention, the carrying moiety and the antigen binding domain are fused without a linker. In a more specific embodiment, an amino bond is formed between the N-terminal amino acid of the carrying moiety and the C-terminal amino acid of the antigen binding domain to form a fusion protein. The formed fusion protein contains a cleavage site. In a particular embodiment, one to several N-terminal amino acids of the carrying moiety or/and one to several C-terminal amino acids of the antigen binding domain are altered, and the N terminus of the carrying moiety and the C terminus of the antigen binding domain are fused to form a cleavage site near the fusion position. More specifically, the cleavage site can be formed, for example, by converting four C-terminal amino acids of the antigen binding domain to a LSGR sequence and converting four N-terminal amino acids of the carrying moiety to a SDNH sequence.

[0892] In some embodiments of the present invention, the cleavage site of the polypeptide comprising a carrying moiety and an antigen binding domain comprises a protease cleavage sequence. The protease cleavage sequence may be placed at any position in the polypeptide as long as the antigen binding domain is released by protease cleavage and does not lose its antigen binding activity after the release.

[0893] In some embodiments of the present invention, the carrying moiety comprises an antibody constant region, and the N terminus of the antibody constant region and the C terminus of the antigen binding domain are fused via a linker or without a linker.

[0894] In a particular embodiment, the protease cleavage sequence is located within the antibody constant region contained in the carrying moiety. In this case, the protease cleavage sequence can be located within the antibody constant region such that the antigen binding domain is released by protease cleavage. In a specific embodiment, the protease cleavage sequence is located within an antibody heavy chain constant region contained in the carrying moiety, and more specifically located on the antigen binding domain side with respect to amino acid position 140 (EU numbering) in the antibody heavy chain constant region, preferably on the antigen binding domain side with respect to amino acid position 122 (EU numbering) in the antibody heavy chain constant region. In an alternative specific embodiment, the protease cleavage sequence is located within an antibody light chain constant region contained in the carrying moiety, and more specifically located on the antigen binding domain side with respect to amino acid position 130 (EU numbering) (Kabat numbering position 130) in the antibody light chain constant region, preferably on the antigen binding domain side with respect to amino acid position 113 (EU numbering) (Kabat numbering position 113) in the antibody light chain constant region.

[0895] In some embodiments of the present invention, the antigen binding domain is a single-domain antibody, and the C terminus of the single-domain antibody and the N terminus of the carrying moiety are fused via a linker or without a linker.

[0896] In a particular embodiment, the protease cleavage sequence is located within the antigen binding domain. In a more specific embodiment, the antigen binding domain is a single-domain antibody, and the single-domain antibody is a single-domain antibody prepared from VH, or VHH, and the protease cleavage sequence is located on the carrying moiety side with respect to amino acid position 35b (Kabat numbering) of the single-domain antibody, preferably on the carrying moiety side with respect to amino acid position 95 (Kabat numbering) of the single-domain antibody, more preferably on the carrying moiety side with respect to amino acid position 109 (Kabat numbering) of the single-domain antibody. In an alternative specific embodiment, the antigen binding domain is a single-domain antibody, and the single-domain antibody is a single-domain antibody prepared from VL, and the protease cleavage sequence is located on the carrying moiety side with respect to amino acid position 32 (Kabat numbering) of the single-domain antibody, preferably on the carrying moiety side with respect to amino acid position 91 (Kabat numbering) of the single-domain antibody, more preferably on the carrying moiety side with respect to amino acid position 104 (Kabat numbering) of the single-domain antibody.

[0897] In some embodiments of the present invention, the carrying moiety comprises an antibody constant region, the antigen binding domain is a single-domain antibody, and the antibody constant region and the single-domain antibody are fused via a linker or without a linker. In a more specific embodiment, the N terminus of the antibody constant region and the C terminus of the single-domain antibody are fused via a linker or without a linker. In an alternative specific embodiment, the C terminus of the antibody constant region and the N terminus of the single-domain antibody are fused via a linker or without a linker.

[0898] In a particular embodiment, the protease cleavage sequence is located within the antibody constant region contained in the carrying moiety. In a more specific embodiment, the protease cleavage sequence is located on the antigen binding domain side with respect to amino acid position 140 (EU numbering) in an antibody heavy chain constant region, preferably on the antigen binding domain side with respect to amino acid position 122 (EU numbering) in an antibody heavy chain constant region. In an alternative specific embodiment, the protease cleavage sequence is located on the antigen binding domain side with respect to amino acid position 130 (EU numbering) (Kabat numbering position 130) in an antibody light chain constant region, preferably on the antigen binding domain side with respect to amino acid position 113 (EU numbering) (Kabat numbering position 113) in an antibody light chain constant region.

[0899] In a particular embodiment, the protease cleavage sequence is located within the antigen binding domain. In a more specific embodiment, the antigen binding domain is a single-domain antibody, and the single-domain antibody is a single-domain antibody prepared from VH, or VHH, and the protease cleavage sequence is located on the antibody constant region side with respect to amino acid position 35b (Kabat numbering) of the single-domain antibody, preferably on the antibody constant region side with respect to amino acid position 95 (Kabat numbering) of the single-domain antibody, more preferably on the antibody constant region side with respect to amino acid position 109 (Kabat numbering) of the single-domain antibody. In an alternative specific embodiment, the antigen binding domain is a single-domain antibody, and the single-domain antibody is a single-domain antibody prepared from VL, and the protease cleavage sequence is located on the antibody constant region side with respect to amino acid position 32 (Kabat numbering) of the single-domain antibody, preferably on the antibody constant region side with respect to amino acid position 91 (Kabat numbering) of the single-domain antibody, more preferably on the antibody constant region side with respect to amino acid position 104 (Kabat numbering) of the single-domain antibody.

[0900] In a particular embodiment, the protease cleavage sequence is located near the boundary between the antigen binding domain and the carrying moiety. The phrase “near the boundary between the antigen binding domain and the carrying moiety” refers to a moiety that resides upstream or downstream of the linking site between the antigen binding domain and the carrying moiety and does not largely influence the secondary structure of the antigen binding domain.

[0901] In a more specific embodiment, the antigen binding domain is linked to the antibody constant region contained in the carrying moiety, and the protease cleavage sequence is located near the boundary between the antigen binding domain and the antibody constant region. The phrase “near the boundary between the antigen binding domain and the antibody constant region” can refer to near the boundary between the antigen binding domain and an antibody heavy chain constant region, or near the boundary between the antigen binding domain and an antibody light chain constant region. When the antigen binding domain is a single-domain antibody, and the single-domain antibody is a single-domain antibody prepared from VH, or VHH and is connected to an antibody heavy chain constant region, the phrase “near the boundary between the antigen binding domain and the antibody constant region” can refer to between amino acid position 101 (Kabat numbering) of the single-domain antibody and amino acid position 140 (EU numbering) of the antibody heavy chain constant region and can preferably refer to between amino acid position 109 (Kabat numbering) of the single-domain antibody and amino acid position 122 (EU numbering) of the antibody heavy chain constant region. When the antigen binding domain is a single-domain antibody, and the single-domain antibody is a single-domain antibody prepared from VH, or VHH and is connected to an antibody light chain constant region, the phrase “near the boundary between the antigen binding domain and the antibody light chain constant region” can refer to between amino acid position 101 (Kabat numbering) of the single-domain antibody and amino acid position 130 (EU numbering) (Kabat numbering position 130) of the antibody light chain constant region and can preferably refer to between amino acid position 109 (Kabat numbering) of the single-domain antibody and amino acid position 113 (EU numbering) (Kabat numbering position 113) of the antibody light chain constant region. When the antigen binding domain is a single-domain antibody, and the single-domain antibody is a single-domain antibody prepared from VL, the phrase “near the boundary between the antigen binding domain and the antibody constant region” refers to between amino acid position 96 (Kabat numbering) of the single-domain antibody and the prescribed position of the antibody constant region, preferably between amino acid position 104 (Kabat numbering) of the single-domain antibody and the prescribed position of the antibody constant region.

[0902] In some embodiments of the present invention, the polypeptide is an IgG antibody-like molecule. Examples of such embodiments include, but are not limited to: an embodiment in which the carrying moiety comprises an IgG antibody constant region, an antigen binding domain takes the place of VH of an IgG antibody or a modified IgG antibody, and the antigen binding activity is inhibited by VL or VH; an embodiment in which the carrying moiety comprises an IgG antibody constant region, an antigen binding domain takes the place of VL of an IgG antibody or a modified IgG antibody, and the antigen binding activity is inhibited by VH or VL; and an embodiment in which the carrying moiety comprises an IgG antibody constant region, an antigen binding domain takes the place of one of VH and VL of an IgG antibody or a modified IgG antibody, and an additional antigen binding domain that inhibits the antigen binding activity of the antigen binding domain takes the place of the other domain of the IgG antibody or a modified IgG antibody.

[0903] The term “IgG antibody-like molecule” and “modified IgG antibody” used in the present specification is used to define a molecule having moieties substantially similar in structure to constant domains or constant regions as in an IgG antibody, and moieties substantially similar in structure to variable domains or variable regions as in the IgG antibody, and having conformation substantially similar to that of the IgG antibody. However, in the present specification, the “IgG antibody-like molecule” and “modified IgG antibody” may or may not exert antigen binding activity while retaining the structures similar to those of the IgG antibody. The terms “IgG antibody-like molecule”, “IgG-antibody like molecule” and “IgG-antibody-like molecule” are used interchangeably with each other herein.

[0904] In some embodiments of the present invention, the following types of antibodies are exemplified as the “modified IgG antibody”;
[0905] (i) a “modified IgG antibody” in which a H chain variable domain or a H chain variable region as in the IgG antibody is substituted with a L chain variable domain or a L chain variable region,
[0906] (ii) a “modified IgG antibody” in which a L chain variable domain or a L chain variable region as in the IgG antibody is substituted with a H chain variable domain or a H chain variable region,
[0907] (iii) a “modified IgG antibody” in which a H chain constant domain or a H chain constant region as in the IgG antibody is substituted with a L chain constant domain or a L chain constant region,
[0908] (iv) a “modified IgG antibody” in which a L chain constant domain or a L chain constant region as in the IgG antibody is substituted with a H chain constant domain or a H chain constant region,
[0909] (v) a “modified IgG antibody” having the features defined in the above (i) and (ii),
[0910] (vi) a “modified IgG antibody” having the features defined in the above (i) and (iii),
[0911] (vii) a “modified IgG antibody” having the features defined in the above (i) and (iv),
[0912] (viii) a “modified IgG antibody” having the features defined in the above (ii) and (iii), and
[0913] (ix) a “modified IgG antibody” having the features defined in the above (ii) and (iv),
[0914] (x) a “modified IgG antibody” having the features defined in the above (ii) and (iv)
[0915] (xi) a “modified IgG antibody” having the features defined in the above (i), (ii) and (iii),
[0916] (xii) a “modified IgG antibody” having the features defined in the above (i), (ii) and (iv),
[0917] (xiii) a “modified IgG antibody” having the features defined in the above (i), (iii) and (iv), and
[0918] (xiv) a “modified IgG antibody” having the features defined in the above (ii), (iii) and (iv).

[0919] The polypeptide may comprise one or more antigen binding domains. One or more inhibiting domains may inhibit the antigen binding activity of a plurality of antigen binding domains. A plurality of antigen binding domains may each be associated with the inhibiting domain. A plurality of antigen binding domains may each be fused with the carrying moiety. A plurality of antigen binding domains may each be capable of released from the polypeptide. The cleavage site(s) for releasing a plurality of antigen binding domains may be a plurality of cleavage sites corresponding to the number of antigen binding domains.

[0920] When the polypeptide is an IgG antibody-like molecule, antigen binding domains may be respectively established at moieties corresponding to two variable regions of the IgG antibody, as shown in FIG. 7. Such an embodiment should be understandable by those skilled in the art with reference to the present invention. The antigen binding domains incorporated in both arms may have the same antigen binding specificity or may differ in antigen binding specificity. Such an embodiment should be understandable by those skilled in the art with reference to the present invention. It is obvious that these embodiments are included in the scope of the present invention.

[0921] In some embodiments of the present invention, the antigen binding domain is further linked to a second antigen binding domain. Examples of the second antigen binding domain include, but are not limited to, single-domain antibodies, antibody fragments, antagonists, a module called A domain of approximately 35 amino acids contained in an in vivo cell membrane protein avimer (International Publication Nos. WO2004/044011 and WO2005/040229), adnectin containing a 10Fn3 domain serving as a protein binding domain derived from a glycoprotein fibronectin expressed on cell membranes (International Publication No. WO2002/032925), Affibody containing an IgG binding domain scaffold constituting a three-helix bundle composed of 58 amino acids of protein A (International Publication No. WO1995/001937), DARPins (designed ankyrin repeat proteins) which are molecular surface-exposed regions of ankyrin repeats (AR) each having a 33-amino acid residue structure folded into a subunit of a turn, two antiparallel helices, and a loop (International Publication No. WO2002/020565), anticalin having four loop regions connecting eight antiparallel strands bent toward the central axis in one end of a barrel structure highly conserved in lipocalin molecules such as neutrophil gelatinase-associated lipocalin (NGAL) (International Publication No. WO2003/029462), and a depressed region in the internal parallel sheet structure of a horseshoe-shaped fold composed of repeated leucine-rich-repeat (LRR) modules of an immunoglobulin structure-free variable lymphocyte receptor (VLR) as seen in the acquired immune systems of jawless vertebrates such as lamprey or hagfish (International Publication No. WO2008/016854). In a preferred embodiment, the second antigen binding domain has antigen binding specificity different from that of the antigen binding domain. In a preferred embodiment, the molecular weight of the antigen binding domain and the second antigen binding domain linked is 120 kDa, 100 kDa, 80 kDa, 60 kDa, 40 kDa, 20 kDa or smaller.

[0922] In some more specific embodiments, the antigen binding domain and the second antigen binding domain are single-domain antibodies differing in antigen binding specificity, the antigen binding domain and the second antigen binding domain linked are capable of being released from the polypeptide, and the antigen binding domain and the second antigen binding domain form a bispecific antigen binding molecule after release. Examples of such a bispecific antigen binding molecule include, but are not limited to, a bispecific antigen binding molecule having an antigen binding domain specifically binding to the target cell surface antigen and a second antigen binding domain specifically binding to an immunocyte surface antigen, a bispecific antigen binding molecule having an antigen binding domain and a second antigen binding domain binding to different subunits of the same antigen, and a bispecific antigen binding molecule having an antigen binding domain and a second antigen binding domain binding to different epitopes in the same antigen. Such a bispecific antigen binding molecule can recruit immunocytes to the vicinity of target cells and is thus considered useful in the treatment of a disease caused by the target cells.

[0923] The antigen binding activity of the second antigen binding domain may or may not be inhibited by the carrying moiety. The second antigen binding domain may or may not be associated with a partial structure of the carrying moiety. Particularly, when the antigen binding domain and the second antigen binding domain differ in antigen binding specificity, the antigen binding domain in an unreleased state cannot exert antigen binding activity, as shown in, for example, FIG. 8, even if the antigen binding activity of the second antigen binding domain is not inhibited and even if the second antigen binding domain is not associated with a partial structure of the carrying moiety. This bispecific antigen binding molecule comprising the antigen binding domain linked to the second antigen binding domain cannot exert a function of bispecifically binding to two types of antigens.

[0924] FIG. 8 shows one exemplary form in which the antigen binding domain is further linked to the second antigen binding domain.

[0925] In the present specification, the term “specificity” refers to a property by which one of specifically binding molecules does not substantially bind to a molecule other than its one or more binding partner molecules. This term is also used when the antigen binding domain has specificity for an epitope contained in a particular antigen. The term is also used when the antigen binding domain has specificity for a particular epitope among a plurality of epitopes contained in an antigen. In this context, the term “not substantially bind” is determined according to the method described in the section about binding activity and means that the binding activity of a specific binding molecule for a molecule other than the binding partner(s) is 80% or less, usually 50% or less, preferably 30% or less, particularly preferably 15% or less, of its binding activity for the binding partner molecule(s).

[0926] The present invention also relates to a pharmaceutical composition (drug) comprising the polypeptide of the present invention and a pharmaceutically acceptable carrier.

[0927] The “treatment” (and its grammatically derived words, for example, “treat” and “treating”) used in the present specification means clinical intervention that intends to alter the natural course of an individual to be treated and can be carried out both for prevention and during the course of a clinical pathological condition. The desirable effect of the treatment includes, but is not limited to, the prevention of the development or recurrence of a disease, the alleviation of symptoms, the attenuation of any direct or indirect pathological influence of the disease, the prevention of metastasis, reduction in the rate of progression of the disease, recovery from or alleviation of a disease condition, and ameliorated or improved prognosis. In some embodiments, the polypeptide of the present invention is used for delaying the onset of a disease or delaying the progression of the disease.

[0928] In the present invention, the pharmaceutical composition usually refers to a drug for the treatment or prevention of a disease or for examination or diagnosis. In the present invention, the term “pharmaceutical composition comprising the polypeptide” may be used interchangeably with a “method for treating a disease, comprising administering the polypeptide to a subject to be treated” and may be used interchangeably with “use of the polypeptide for the production of a drug for the treatment of a disease”. Also, the term “pharmaceutical composition comprising the polypeptide” may be used interchangeably with “use of the polypeptide for treating a disease”.

[0929] The pharmaceutical composition of the present invention can be formulated by use of a method known to those skilled in the art. For example, the pharmaceutical composition can be parenterally used in an injection form of a sterile solution or suspension with water or any of other pharmaceutically acceptable liquids. The pharmaceutical composition can be formulated, for example, by appropriately combining the polypeptide with a pharmacologically acceptable carrier or medium, specifically, sterile water or physiological saline, a plant oil, an emulsifier, a suspending agent, a surfactant, a stabilizer, a flavoring agent, an excipient, a vehicle, an antiseptic, a binder, etc. and mixing them into a unit dosage form required for generally accepted pharmaceutical practice. The amount of the active ingredient in these formulations is set so as to give an appropriate volume in a prescribed range.

[0930] A sterile composition for injection can be formulated according to usual pharmaceutical practice using a vehicle such as injectable distilled water. Examples of the injectable aqueous solution include isotonic solutions containing physiological saline, glucose, or other adjuvants (e.g., D-sorbitol, D-mannose, D-mannitol, and sodium chloride). The aqueous solution can be used in combination with an appropriate solubilizer, for example, an alcohol (ethanol, etc.), a polyalcohol (propylene glycol, polyethylene glycol, etc.), or a nonionic surfactant (Polysorbate 80™, HCO-50, etc.).

[0931] Examples of the oil solution include sesame oil and soybean oil. The oil solution can also be used in combination with benzyl benzoate and/or benzyl alcohol as a solubilizer. The oil solution can be supplemented with a buffer (e.g., a phosphate buffer solution and a sodium acetate buffer solution), a soothing agent (e.g., procaine hydrochloride), a stabilizer (e.g., benzyl alcohol and phenol), and an antioxidant. The prepared injection solution is usually filled into an appropriate ampule.

[0932] The pharmaceutical composition of the present invention is preferably administered through a parenteral route. For example, a composition having an injection, intraarticular, transnasal, transpulmonary, or percutaneous dosage form is administered. The pharmaceutical composition can be administered systemically or locally by, for example, intravenous injection, intramuscular injection, intraperitoneal injection, or subcutaneous injection.

[0933] The administration method can be appropriately selected according to the age and symptoms of a patient. The dose of the pharmaceutical composition containing the polypeptide can be set to the range of, for example, 0.0001 mg to 1000 mg per kg body weight per dose. Alternatively, the dose of the pharmaceutical composition containing the polypeptide can be set to a dose of, for example, 0.001 to 100000 mg per patient. However, the present invention is not necessarily limited by these numerical values. Although the dose and the administration method vary depending on the body weight, age, symptoms, etc. of a patient, those skilled in the art can set an appropriate dose and administration method in consideration of these conditions. Subjects to be administered (applied) with the polypeptide of the present invention include, which can be virtually any animal, for example, a human, monkey, mouse, rabbit, etc.

[0934] The present invention also relates to a method for producing a polypeptide comprising a carrying moiety having an inhibiting domain, and an antigen binding domain.

[0935] One method for producing the polypeptide of the present invention is a method comprising: obtaining an antigen binding domain having antigen binding activity; linking the antigen binding domain to a carrying moiety such that the antigen binding activity of the antigen binding domain is inhibited by an inhibiting domain, to form a polypeptide precursor; and further inserting a cleavage site into the polypeptide precursor or altering a portion of the polypeptide precursor to a cleavage site. The method for introducing the cleavage site can be any of the insertion of the cleavage site and the alteration of a portion of the polypeptide precursor as long as the cleavage site can be introduced into the polypeptide precursor. Alternatively, an alteration site may be introduced into the polypeptide precursor by the combination of both the approaches. Such an embodiment should be obvious to those skilled in the art with reference to the present specification and is included in the scope of the present invention.

[0936] Another method for producing the polypeptide of the present invention is a method comprising: obtaining an antigen binding domain having antigen binding activity; and linking the antigen binding domain to a carrying moiety via a cleavage site such that the antigen binding activity of the antigen binding domain is inhibited by an inhibiting domain, to form a polypeptide. When the antigen binding domain is linked to the carrying moiety via a cleavage site, the cleavage site may be sandwiched between the antigen binding domain and the carrying moiety, or a portion of the antigen binding domain or/and a portion of the carrying moiety may be altered and used as a portion of the cleavage site.

[0937] The method for producing the polypeptide will be described below. In one embodiment of the present invention, the antigen binding domain is preferably a VL having antigen binding activity by itself. Further, in one embodiment of the present invention, an antigen is preferably IL-1R1, IL-1alpha, IL-1beta or IL-1RAcP.

[0938] In one embodiment of the present invention, the method for producing a polypeptide comprising a carrying moiety having an inhibiting domain, and an antigen binding domain is a production method comprising the following steps:
[0939] (a) obtaining an antigen binding domain binding to a target antigen;
[0940] (b) linking the antigen binding domain obtained in the step (a) to a carrying moiety such that the antigen binding activity of the antigen binding domain is inhibited by an inhibiting domain of the carrying moiety, to form a polypeptide precursor; and
[0941] (c) introducing a protease cleavage sequence into the polypeptide precursor.

[0942] In one embodiment of the present invention, the method for producing a polypeptide comprising a carrying moiety having an inhibiting domain, and an antigen binding domain is a production method comprising the following steps:
[0943] (a) obtaining an antigen binding domain binding to a target antigen;
[0944] (b) linking the antigen binding domain obtained in the step (a) to a carrying moiety such that the antigen binding activity of the antigen binding domain is inhibited by an inhibiting domain of the carrying moiety, to form a polypeptide precursor; and
[0945] (c) introducing a protease cleavage sequence to near the boundary between the antigen binding domain and the carrying moiety.

[0946] In one embodiment of the present invention, the method for producing a polypeptide comprising a carrying moiety having an inhibiting domain, and an antigen binding domain is a production method comprising the following steps:
[0947] (a) obtaining an antigen binding domain binding to a target antigen; and
[0948] (b) linking the antigen binding domain obtained in the step (a) to the carrying moiety via a protease cleavage sequence such that the antigen binding activity of the antigen binding domain is inhibited by an inhibiting domain of the carrying moiety, to form a polypeptide.

[0949] In a particular embodiment, the method for producing a polypeptide comprising a carrying moiety having an inhibiting domain, and an antigen binding domain is the production method further comprising the following step:
[0950] (d) confirming that the binding activity of the antigen binding domain incorporated in the polypeptide or the polypeptide precursor against the target antigen is weakened or lost.

[0951] In the present invention, the phrase “binding activity is weakened” means that the binding activity against the target antigen is decreased as compared with that before the linking, and the degree of this decrease is not limited.

[0952] In a particular embodiment, the method for producing a polypeptide comprising a carrying moiety having an inhibiting domain, and an antigen binding domain is the production method further comprising the following step:
[0953] (e) releasing the antigen binding domain by the protease cleavage of the protease cleavage sequence and confirming that the released antigen binding domain binds to the antigen.

[0954] In one embodiment of the present invention, the method for producing a polypeptide which is an IgG antibody-like molecule comprising a carrying moiety having an inhibiting domain, and an antigen binding domain is a production method comprising the following steps:
[0955] (a) obtaining an antigen binding domain binding to a target antigen;
[0956] (b) associating the antigen binding domain obtained in the step (a) as a substitute for VH of an IgG antibody or a modified IgG antibody with VL or VH, or associating the antigen binding domain as a substitute for VL of an IgG antibody or a modified IgG antibody with VH or VL such that the antigen binding activity of the antigen binding domain is inhibited, to form an IgG antibody-like molecule precursor harboring the antigen binding domain; and
[0957] (c) introducing a protease cleavage sequence into the IgG antibody-like molecule precursor harboring the antigen binding domain.

[0958] In one embodiment of the present invention, the method for producing a polypeptide which is an IgG antibody-like molecule comprising a carrying moiety having an inhibiting domain, and an antigen binding domain is a production method comprising the following steps:
[0959] (a) obtaining an antigen binding domain binding to a target antigen;
[0960] (b) associating the antigen binding domain obtained in the step (a) as a substitute for VH of an IgG antibody or a modified IgG antibody with VL or VH, or associating the antigen binding domain as a substitute for VL of an IgG antibody or a modified IgG antibody with VH or VL such that the antigen binding activity of the antigen binding domain is inhibited, to form an IgG antibody-like molecule precursor harboring the antigen binding domain; and
[0961] (c) introducing a protease cleavage sequence to near the boundary between the antigen binding domain and an antibody constant region in the IgG antibody-like molecule precursor.

[0962] In one embodiment of the present invention, the method for producing a polypeptide which is an IgG antibody-like molecule comprising a carrying moiety having an inhibiting domain, and an antigen binding domain is a production method comprising the following steps:
[0963] (a) obtaining an antigen binding domain binding to a target antigen; and
[0964] (b) linking the antigen binding domain obtained in the step (a) as a substitute for IgG antibody VH or VL to an IgG antibody heavy chain constant region or light chain constant region via a protease cleavage sequence such that the antigen binding activity of the antigen binding domain is inhibited, to form an IgG antibody-like molecule harboring the antigen binding domain.

[0965] In a particular embodiment, the method for producing a polypeptide which is an IgG antibody-like molecule comprising a carrying moiety having an inhibiting domain, and an antigen binding domain is the production method further comprising the following step:
[0966] (d) confirming that the binding activity of the antigen binding domain harbored in the IgG antibody-like molecule or the IgG antibody-like molecule precursor against the target antigen is weakened or lost.

[0967] In the present invention, the phrase “binding activity is weakened” means that the binding activity against the target antigen is decreased as compared with that before the association or the linking, and the degree of this decrease is not limited.

[0968] In a particular embodiment, the method for producing a polypeptide which is an IgG antibody-like molecule comprising a carrying moiety having an inhibiting domain, and an antigen binding domain is the production method further comprising the following step:
[0969] (e) releasing the antigen binding domain by the protease cleavage of the protease cleavage sequence and confirming that the released antigen binding domain binds to the target antigen.

[0970] In the case of using VH, VL or VHH as the inhibiting domain, the method for inhibiting the antigen binding activity of the antigen binding domain by the inhibiting domain of the carrying moiety includes a method of associating the antigen binding domain with VH, VL or VHH. The VH, the VL or the VHH that inhibits the antigen binding activity of the provided antigen binding domain can be screened for by associating known VH, VL or VHH with the antigen binding domain and comparing the antigen binding activity of the antigen binding domain between before and after the association.

[0971] In another method for inhibiting the antigen binding activity of the antigen binding domain by particular VH, VL or VHH, an amino acid residue involved in association with VH, VL or VHH, in the antigen binding domain can be substituted to promote the association, or an antigen binding domain/inhibiting domain pair having the desired level of difference in antigen binding activity between before and after the association can also be provided by using an antigen binding domain originally having, as such an amino acid residue, an amino acid that can promote the association.

[0972] In one embodiment of the present invention, the method for producing a polypeptide which is an IgG antibody-like molecule comprising a carrying moiety having an inhibiting domain, and an antigen binding domain is a production method comprising the following steps:
[0973] (a) substituting an amino acid residue in an antigen binding domain that involves in association of the antigen binding domain with antibody VH, or substituting an amino acid residue in an antigen binding domain that involves in association of the antigen binding domain with antibody VL to prepare an antigen binding domain variant retaining the binding activity of the antigen binding domain against the target antigen;
[0974] (b) associating the antigen binding domain variant prepared in the step (a) with antibody VH, or associating the antigen binding domain variant with antibody VL such that the antigen binding activity of the antigen binding domain variant is inhibited, to form an IgG antibody-like molecule precursor harboring the antigen binding domain variant; and
[0975] (c) introducing a protease cleavage sequence into the IgG antibody-like molecule precursor harboring the antigen binding domain variant.

[0976] In one embodiment of the present invention, the method for producing a polypeptide which is an IgG antibody-like molecule comprising a carrying moiety having an inhibiting domain, and an antigen binding domain is a production method comprising the following steps:
[0977] (a) substituting an amino acid residue in an antigen binding domain that involves in association of the antigen binding domain with antibody VH, or substituting an amino acid residue in an antigen binding domain that involves in association of the antigen binding domain with antibody VL, to prepare an antigen binding domain variant retaining the binding activity of the antigen binding domain against the target antigen;
[0978] (b) associating the antigen binding domain variant prepared in the step (a) with antibody VH, or associating the antigen binding domain variant with antibody VL such that the antigen binding activity of the antigen binding domain is inhibited, to form an IgG antibody-like molecule precursor harboring the antigen binding domain variant; and
[0979] (c) introducing a protease cleavage sequence to near the boundary between the antigen binding domain variant and a constant region in the IgG antibody-like molecule precursor.

[0980] In one embodiment of the present invention, the method for producing a polypeptide which is an IgG antibody-like molecule comprising a carrying moiety having an inhibiting domain, and an antigen binding domain is a production method comprising the following steps:
[0981] (a) substituting an amino acid residue in an antigen binding domain that involves in association of the antigen binding domain with antibody VH, or substituting an amino acid residue in an antigen binding domain that involves in association of the antigen binding domain with antibody VL, to prepare an antigen binding domain variant retaining the binding activity of the antigen binding domain against the target antigen; and
[0982] (b) linking the antigen binding domain variant prepared in the step (a) to an IgG antibody heavy chain constant region via a protease cleavage sequence, or linking the antigen binding domain variant to an IgG antibody light chain constant region via a protease cleavage sequence such that the antigen binding activity of the antigen binding domain variant is inhibited, to form an IgG antibody-like molecule harboring the antigen binding domain variant.

[0983] In a particular embodiment, the method for producing a polypeptide which is an IgG antibody-like molecule comprising a carrying moiety having an inhibiting domain, and an antigen binding domain is the production method further comprising the following step:
[0984] (d) confirming that the binding activity of the antigen binding domain variant harbored in the IgG antibody-like molecule or the IgG antibody-like molecule precursor against the target antigen is weakened or lost.

[0985] In the present invention, the phrase “binding activity is weakened” means that the binding activity against the target antigen is decreased as compared with that before the association or the linking, and the degree of this decrease is not limited.

[0986] In a particular embodiment, the method for producing a polypeptide which is an IgG antibody-like molecule comprising a carrying moiety having an inhibiting domain, and an antigen binding domain is the production method further comprising the following step:
[0987] (e) releasing the antigen binding domain variant by the protease cleavage of the protease cleavage sequence and confirming that the released antigen binding domain variant binds to the target antigen.

[0988] The present invention also relates to a polynucleotide encoding the polypeptide comprising a carrying moiety having an inhibiting domain, and an antigen binding domain.

[0989] The polynucleotide according to the present invention is usually carried by (or inserted in) an appropriate vector and transferred to host cells. The vector is not particularly limited as long as the vector can stably retain an inserted nucleic acid. For example, when E. coli is used as the host, a pBluescript vector (manufactured by Stratagene Corp.) or the like is preferred as a vector for cloning. Various commercially available vectors can be used. In the case of using the vector for the purpose of producing the polypeptide of the present invention, an expression vector is particularly useful. The expression vector is not particularly limited as long as the vector permits expression of the polypeptide in vitro, in E. coli, in cultured cells, or in organism individuals. The expression vector is preferably, for example, a pBEST vector (manufactured by Promega Corp.) for in vitro expression, a pET vector (manufactured by Invitrogen Corp.) for E. coli, a pME18S-FL3 vector (GenBank Accession No. AB009864) for cultured cells, and a pME18S vector (Mol Cell Biol. 8: 466-472 (1988)) for organism individuals. The insertion of the DNA of the present invention into the vector can be performed by a routine method, for example, ligase reaction using restriction sites (Current protocols in Molecular Biology edit. Ausubel et al. (1987) Publish. John Wiley & Sons. Section 11.4-11.11).

[0990] The host cells are not particularly limited, and various host cells are used according to the purpose. Examples of the cells for expressing the polypeptide can include bacterial cells (e.g., Streptococcus, Staphylococcus, E. coli, Streptomyces, and Bacillus subtilis), fungal cells (e.g., yeasts and Aspergillus), insect cells (e.g., Drosophila S2 and Spodoptera SF9), animal cells (e.g., CHO, COS, HeLa, C127, 3T3, BHK, HEK293, and Bowes melanoma cells) and plant cells. The transfer of the vector to the host cells may be performed by a method known in the art, for example, a calcium phosphate precipitation method, an electroporation method (Current protocols in Molecular Biology edit. Ausubel et al., (1987) Publish. John Wiley & Sons. Section 9.1-9.9), a Lipofectamine method (manufactured by GIBCO-BRL/Thermo Fisher Scientific Inc.), or a microinjection method.

[0991] An appropriate secretory signal can be incorporated into the polypeptide of interest in order to secrete the polypeptide expressed in the host cells to the lumen of the endoplasmic reticulum, periplasmic space, or an extracellular environment. The signal may be endogenous to the polypeptide of interest or may be a foreign signal.

[0992] When the polypeptide of the present invention is secreted into a medium, the recovery of the polypeptide in the production method is performed by the recovery of the medium. When the polypeptide of the present invention is produced into cells, the cells are first lysed, followed by the recovery of the polypeptide.

[0993] A method known in the art including ammonium sulfate or ethanol precipitation, acid extraction, anion- or cation-exchange chromatography, phosphocellulose chromatography, hydrophobic interaction chromatography, affinity chromatography, hydroxyapatite chromatography, and lectin chromatography can be used for recovering and purifying the polypeptide of the present invention from the recombinant cell cultures.

[0994] In some embodiments of the present invention, the antigen binding activity of the antigen binding domain can be inhibited by associating with particular VL, associating with particular VH, or associating with particular VHH. The present invention also relates to a method for screening for such an antigen binding domain. In one embodiment of the present invention, the antigen binding domain is preferably a VL having antigen binding activity by itself. Further, in one embodiment of the present invention, an antigen is preferably IL-1R1, IL-1alpha, IL-1beta or IL-1RAcP.

[0995] The screening methods of the present invention can be used for screening for a candidate substance of a pharmaceutical. When a screening method of the present invention is conducted on, for example, but not limited to, IL-1R1, IL-1alpha, IL-1beta, or IL-1RAcP as a target antigen, an obtained antigen-binding domain can be a candidate for treatment and/or prevention of a disease or disorder mediated by IL-1R1, IL-1alpha, IL-1beta, or IL-1RAcP. Thus, the present invention provides methods of screening for a candidate substance for treatment and/or prevention of a disease or disorder mediated by a target antigen.

[0996] VL, VH or VHH having a known sequence, for example, VL, VH or VHH having a sequence registered in the IMGT or Kabat database, can be used as the VL, the VH or the VHH that inhibits the antigen binding activity of the antigen binding domain. Also, a VL, VH or VHH sequence newly identified from a human antibody library or the like can be used. The VL, the VH or the VHH that inhibits the binding activity of the antigen binding domain can be selected by preparing a protein by the combination of these sequences and measuring the binding activity by use of the method described above.

[0997] In some embodiments of the present invention, VL, VH or VHH having a human antibody germline sequence can be used as the VL, the VH or the VHH that inhibits the antigen binding activity of the antigen binding domain. In the case of using, for example, VL as the inhibiting domain, VL having kappa chain framework sequences or VL having lambda chain framework sequences can be used. Also, VL having modified framework sequences such as combined framework sequences of kappa chain and lambda chain framework sequences can be used. In one embodiment of the present invention, the VH that inhibits the antibody binding activity of an antibody binding domain may be a VH having an amino acid sequence of SEQ ID NO: 486. In one embodiment of the present invention, the VL that inhibits the antibody binding activity of an antibody binding domain may be a VL having an amino acid sequence of SEQ ID NO: 484 or 485.

[0998] In one embodiment, the present invention provides a method for screening for an antigen binding domain whose antigen binding activity can be inhibited by associating with particular VL, comprising the following steps:
[0999] (a) obtaining an antigen binding domain having target antigen binding activity;
[1000] (b) associating the antigen binding domain obtained in the step (a) with a particular VL; and
[1001] (c) confirming that the binding activity of the antigen binding domain associated with the particular VL in the step (b) against the antigen is weakened or lost.

[1002] In the present invention, the phrase “binding activity is weakened” means that the binding activity against the target antigen is decreased as compared with that before the association, and the degree of this decrease is not limited.

[1003] In one embodiment, the present invention provides a method for screening for an antigen binding domain whose antigen binding activity can be inhibited by associating with particular VH, comprising the following steps:
[1004] (a) obtaining an antigen binding domain having target antigen binding activity;
[1005] (b) associating the antigen binding domain obtained in the step (a) with a particular VH; and
[1006] (c) confirming that the binding activity of the antigen binding domain associated with the particular VH in the step (b) against the antigen is weakened or lost.

[1007] In the present invention, the phrase “binding activity is weakened” means that the binding activity against the target antigen is decreased as compared with that before the association, and the degree of this decrease is not limited.

[1008] In one embodiment, the present invention provides a method for screening for an antigen binding domain whose antigen binding activity can be inhibited by associating with particular VHH, comprising the following steps:
[1009] (a) obtaining an antigen binding domain having target antigen binding activity;
[1010] (b) associating the antigen binding domain obtained in the step (a) with a particular VHH; and
[1011] (c) confirming that the binding activity of the antigen binding domain associated with the particular VHH in the step (b) against the antigen is weakened or lost.

[1012] In the present invention, the phrase “binding activity is weakened” means that the binding activity against the target antigen is decreased as compared with that before the association, and the degree of this decrease is not limited.

[1013] Examples of the method for associating the antigen binding domain with the particular VL, VH or VHH include a method of designing a molecule having the sequence of the antigen binding domain as a substitute for the sequence of one of VH and VL in an antibody or an antibody fragment comprising both VH and VL, such as a complete antibody, Fab, Fab′, or (Fab)2, and expressing a polypeptide having the sequence.

[1014] The present invention also relates to a method for producing an antigen binding domain whose antigen binding activity is inhibited by promoting the association of the antigen binding domain with particular VL, promoting the association of the antigen binding domain with particular VH, or promoting the association of the antigen binding domain with particular VHH, in addition to screening for an antigen binding domain whose antigen binding activity is inhibited by associating with particular VL, associating with particular VH, or associating with particular VHH.

[1015] In one embodiment, the present invention provides a method for producing an antigen binding domain whose antigen binding activity is inhibited by associating with particular VL, comprising the following step:
[1016] (a) substituting an amino acid residue in an antigen binding domain that involves in association of the antigen binding domain with antibody VL, to prepare an antigen binding domain variant retaining the binding activity of the antigen binding domain against the target antigen.

[1017] In a particular embodiment, the present invention provides the method for producing an antigen binding domain whose antigen binding activity is inhibited by associating with particular VL, further comprising the following steps:
[1018] (b) associating the antigen binding domain variant prepared in the step (a) with the particular VL; and
[1019] (c) confirming that the antigen binding activity of the antigen binding domain variant associated with the VL is weakened or lost.

[1020] In the present invention, the phrase “binding activity is weakened” means that the binding activity against the target antigen is decreased as compared with that before the association, and the degree of this decrease is not limited.

[1021] In one embodiment, the present invention provides a method for producing an antigen binding domain whose antigen binding activity is inhibited by associating with particular VH, comprising the following step:
[1022] (a) substituting an amino acid residue in an antigen binding domain that involves in association of the antigen binding domain with antibody VH, to prepare an antigen binding domain variant retaining the binding activity of the antigen binding domain against the target antigen.

[1023] In a particular embodiment, the present invention provides the method for producing an antigen binding domain whose antigen binding activity is inhibited by associating with particular VH, further comprising the following steps:
[1024] (b) associating the antigen binding domain variant prepared in the step (a) with the particular VH; and
[1025] (c) confirming that the antigen binding activity of the antigen binding domain variant associated with the VH is weakened or lost.

[1026] In the present invention, the phrase “binding activity is weakened” means that the binding activity against the target antigen is decreased as compared with that before the association, and the degree of this decrease is not limited.

[1027] In one embodiment, the present invention provides a method for producing an antigen binding domain whose antigen binding activity is inhibited by associating with particular VHH, comprising the following step:
[1028] (a) substituting an amino acid residue in an antigen binding domain that involves in association of the antigen binding domain with VHH, to prepare an antigen binding domain variant retaining the binding activity of the antigen binding domain against the target antigen.

[1029] In a particular embodiment, the present invention provides the method for producing an antigen binding domain whose antigen binding activity is inhibited by associating with particular VHH, further comprising the following steps:
[1030] (b) associating the antigen binding domain variant prepared in the step (a) with the particular VHH; and
[1031] (c) confirming that the antigen binding activity of the antigen binding domain variant associated with the VHH is weakened or lost.

[1032] In the present invention, the phrase “binding activity is weakened” means that the binding activity against the target antigen is decreased as compared with that before the association, and the degree of this decrease is not limited.

[1033] The step of associating the antigen binding domain with the particular VL, VH or VHH is performed by a method of designing a molecule having the sequence of the antigen binding domain as a substitute for the sequence of one of VH and VL in an antibody or an antibody fragment comprising both VH and VL, such as a complete antibody, Fab, Fab′, or (Fab)2, and expressing a polypeptide having the sequence.

[1034] According to a certain embodiment of the present invention, the antigen binding domain of the present invention whose antigen binding activity can be inhibited or could be lost by associating with particular VL, VH or VHH can be obtained from a library comprising a plurality of fusion polypeptides of antigen binding domains each linked to a first association sustaining domain.

[1035] In the present specification, an embodiment of the “library” can provide a library that permits efficient obtainment of an antigen binding domain whose antigen binding activity can be inhibited or could be lost by associating with particular VL, VH or VHH.

[1036] In the present specification, the “library” refers to a set of a plurality of fusion polypeptides having different sequences, or nucleic acids or polynucleotides encoding these fusion polypeptides. A plurality of fusion polypeptides contained in the library are fusion polypeptides differing in sequence from each other, not having a single sequence.

[1037] In the present specification, the term “differing in sequence from each other” in a plurality of fusion polypeptides differing in sequence from each other means that the individual fusion polypeptides in the library have distinct sequences. More preferably, the term means that the antigen binding domain moieties of the individual fusion polypeptides in the library have distinct sequences. Specifically, the number of the distinct sequences in the library reflects the number of independent clones differing in sequences in the library and is also referred to as a “library size”. The library size of a usual phage display library is 106 to 1012 and may be expanded to 1014 by the application of a technique known in the art such as a ribosome display method. However, the actual number of phage particles for use in panning selection for the phage library is usually 10 to 10,000 times larger than the library size. This excessive multiple, also called the “number of equivalents of the library”, represents that 10 to 10,000 individual clones may have the same amino acid sequence. Accordingly, the term “differing in sequence from each other” according to the present invention means that the individual polypeptides in the library excluding the number of equivalents of the library have distinct sequences and more specifically means that the library has 106 to 1014 molecules, preferably 107 to 1012 molecules, of polypeptides differing in sequence from each other.

[1038] The term “plurality or in the library consisting essentially of” a plurality of fusion polypeptides according to the present invention usually refers to a set of two or more types of substances as to, for example, the polypeptide, polynucleotide molecule, vector, or virus of the present invention. Provided that, for example, two or more substances differ in particular trait from each other, this means that the substances are of two or more types. Examples thereof can include a mutant amino acid observed at a particular amino acid position in an amino acid sequence. For example, two or more polypeptides of the present invention having substantially the same, preferably identical sequences, except for particular mutant amino acids at surface-exposed, highly diverse amino acid positions are regarded as a plurality of polypeptides of the present invention. In another example, two or more polynucleotide molecules of the present invention having substantially the same, preferably identical sequences except for bases encoding particular mutant amino acids at surface-exposed, highly diverse amino acid positions are regarded as a plurality of polynucleotide molecules of the present invention.

[1039] A panning method that utilizes phage vectors is also preferably used as a method for screening the fusion polypeptides with binding activity as an index. A gene encoding each antigen binding domain and a gene encoding an IgG antibody CH1 domain or a light chain constant region can be linked in an appropriate form to form a fusion polypeptide. Genes encoding the fusion polypeptides thus formed can be inserted into phage vectors to obtain phages expressing the fusion polypeptides on the surface. After contact of the phages with the desired antigen, phages bound with the antigen can be recovered to recover DNAs encoding fusion polypeptides having the binding activity of interest. This operation can be repeated, if necessary, to enrich fusion polypeptides having the desired binding activity.

[1040] In addition to the phage display method, a technique using a cell-free translation system, a technique of presenting or displaying fusion polypeptides on cell or virus surface, a technique of using an emulsion, and the like are known as techniques of obtaining fusion polypeptides by panning using a library. For example, a ribosome display method of forming a complex of mRNA and a translated protein via ribosome by the removal of a stop codon, etc., a cDNA or mRNA display method of covalently binding a gene sequence to a translated protein using a compound such as puromycin, or a CIS display method of forming a complex of a gene and a translated protein using a nucleic acid binding protein can be used as the technique using a cell-free translation system. For example, the phage display method as well as an E. coli display method, a gram-positive bacterium display method, a yeast display method, a mammalian cell display method, or a virus display method can be used as the technique of presenting or displaying fusion polypeptides on cell or virus surface. For example, an in vitro virus display method using an emulsion containing a gene and a translation-related molecule can be used as the technique using an emulsion. These methods are already known in the art (Nat Biotechnol. 2000 December; 18(12): 1287-92, Nucleic Acids Res. 2006; 34(19): e127, Proc Natl Acad Sci USA. 2004 Mar. 2; 101(9): 2806-10, Proc Natl Acad Sci USA. 2004 Jun. 22; 101(25): 9193-8, Protein Eng Des Sel. 2008 April; 21(4): 247-55, Proc Natl Acad Sci USA. 2000 Sep. 26; 97(20): 10701-5, MAbs. 2010 September-October; 2(5): 508-18, Methods Mol Biol. 2012; 911: 183-98).

[1041] An association partner of an inhibiting domain linked to a second association sustaining domain can be used in a method for obtaining the antigen binding domain of interest from the library comprising a plurality of fusion polypeptides of antigen binding domains each linked to a first association sustaining domain.

[1042] In the present specification, the “first association sustaining domain” and the “second association sustaining domain” refer to domains that can interact with each other through a bond such as a hydrophobic bond, a hydrogen bond, or an ionic bond to form an associate. Preferred examples of the first association sustaining domain and the second association sustaining domain include, but are not limited to, an antibody light chain constant region (CL) and a CH1 domain of a heavy chain constant region.

[1043] The first association sustaining domain and the second association sustaining domain can interact with each other and form the association of the fusion polypeptide with the association partner, regardless of the degree of associativity between the antigen binding domain and the inhibiting domain.

[1044] In an alternative embodiment, the present invention provides a library comprising a plurality of fusion polypeptides of antigen binding domains linked to an IgG antibody light chain constant region, wherein the antigen binding domains include an antigen binding domain whose antigen binding activity can be inhibited or could be lost by associating with particular VL, VH or VHH, and a method for screening the library for an antigen binding domain whose antigen binding activity can be inhibited or could be lost by associating with particular VL, VH or VHH.

[1045] In a specific embodiment, as shown in FIGS. 9A(1), 9A(2), 9A(3), 9B, and 9C,
[1046] (1) fusion polypeptides of antigen binding domains each linked to a first association sustaining domain are displayed on the surface of phages or the like by a display method such as phage display.
[1047] (2) An association partner of an inhibiting domain linked to a second association sustaining domain is provided, and the fusion polypeptides are associated with the association partner. A fusion polypeptide that does not bind to the target antigen or has antigen binding activity of a predetermined value or lower in this state of the fusion polypeptide associated with the association partner is selected.
[1048] (3) The association of the antigen binding domain in the fusion polypeptide selected in (2) with the inhibiting domain in the association partner is canceled. A fusion polypeptide that binds to the target antigen or has antigen binding activity of a predetermined value or higher in a state where the antigen binding domain does not associate with the inhibiting domain is selected.

[1049] In this context, for example, a method of cleaving the association partner near the boundary between the inhibiting domain and the second association sustaining domain as shown in FIG. 9B, or a method of cleaving the fusion polypeptide near the boundary between the antigen binding domain and the first association sustaining domain as shown in FIG. 9C can be used as a method for canceling the association of the antigen binding domain with the inhibiting domain.

[1050] In a further embodiment, the present invention provides a method comprising, as shown in FIG. 9D, comparing the difference in the binding activity of the antigen binding domain between when the antigen binding domain and the inhibiting domain are expressed together and when the antigen binding domain is expressed so as not to express the inhibiting domain together therewith, instead of comparing the difference in the binding activity of the antigen binding domain between the canceled association and non-canceled association of the antigen binding domain with the inhibiting domain as shown in FIGS. 9A to 9C.

[1051] As shown in FIG. 9D(1), the antigen binding domain and the inhibiting domain are expressed together to form association. A fusion polypeptide comprising an antigen binding domain that does not bind to the antigen or has antigen binding activity of a predetermined value or lower in this state is selected. As shown in FIGS. 9D(2), 9D(2′), and 9D(2″), the antigen binding domain is expressed so as not to express the inhibiting domain together therewith. A fusion polypeptide comprising an antigen binding domain that binds to the antigen or has antigen binding activity of a predetermined value or higher in this state is selected. As a result, the antigen binding domain whose antigen binding activity can be inhibited or could be lost by associating with a particular inhibiting domain, for example, VH, VL or VHH may be screened for from the library comprising a plurality of fusion polypeptides of antigen binding domains each linked to a first association sustaining domain. Alternatively, the antigen binding domain is expressed so as not to express the inhibiting domain together therewith. A polypeptide comprising an antigen binding domain that binds to the antigen or has antigen binding activity of a predetermined value or higher in this state is selected. Then, the antigen binding domain and the inhibiting domain are expressed together to form association. A polypeptide comprising an antigen binding domain that does not bind to the antigen or has antigen binding activity of a predetermined value or lower in this state is selected. By this method as well, the antigen binding domain whose antigen binding activity can be inhibited or could be lost by associating with a particular inhibiting domain, for example, VH, VL or VHH may be screened for from the library comprising a plurality of fusion polypeptides of antigen binding domains each linked to a first association sustaining domain. Alternatively, as shown in FIGS. 9D(2), 9D(2′), and 9D(2″), the antigen binding domain is expressed so as not to express the inhibiting domain together therewith (only the antigen binding domain is expressed; only the fusion polypeptide comprising an antigen binding domain and a first association sustaining domain is expressed; or the fusion polypeptide comprising an antigen binding domain and a first association sustaining domain is associated only with the second association sustaining domain), and a fusion polypeptide comprising an antigen binding domain that binds to the antigen or has antigen binding activity of a predetermined value or higher in this state is selected. Then, as shown in FIG. 9D(1), the antigen binding domain in the selected fusion polypeptide and the inhibiting domain are expressed together to form association. A fusion polypeptide comprising an antigen binding domain that does not bind to the antigen or has antigen binding activity of a predetermined value or lower in this state is selected. As a result, the antigen binding domain whose antigen binding activity can be inhibited or could be lost by associating with a particular inhibiting domain, for example, VH, VL or VHH may also be screened for from the library comprising a plurality of fusion polypeptides of antigen binding domains each linked to a first association sustaining domain.

[1052] The “antigen binding activity of a predetermined value or lower” can refer to, for example, antigen binding activity that falls below a predetermined reference when the antigen binding activity is measured by the method listed in the present specification. Likewise, the “antigen binding activity of a predetermined value or higher” can refer to, for example, antigen binding activity that exceeds a predetermined reference when the antigen binding activity is measured by the method listed in the present specification. A fusion polypeptide having the antigen binding activity of a predetermined value or higher binds more strongly to the antigen than a fusion polypeptide having the antigen binding activity of a predetermined value or lower.

[1053] The fusion polypeptide selected in (3) described above comprises an antigen binding domain that has no or weak antigen binding activity in a state of association with the inhibiting domain and has (strong) antigen binding activity in a state of non-association with the inhibiting domain. The sequence of the fusion polypeptide selected by such a method can be analyzed to also elucidate the sequence of the antigen binding domain contained therein. Thus, the antigen binding domain can be produced.

[1054] For the method for screening for a fusion polypeptide comprising the antigen binding domain of interest by using fusion polypeptides and an association partner, it is important to compare the antigen binding activity of the antigen binding domain between states of association and non-association with the inhibiting domain. As shown in FIGS. 9A(2′) and 9A(3′), the antigen binding activity of the displayed fusion polypeptides is first confirmed, and a fusion polypeptide that binds to the antigen or has antigen binding activity of a predetermined value or higher is selected. Then, the fusion polypeptides thus selected are associated with the association partner. A fusion polypeptide that does not binds to the antigen or has antigen binding activity of a predetermined value or lower in this state of association is selected. By this method as well, the fusion polypeptide comprising the antigen binding domain of interest can be obtained.

[1055] Hereinafter, some embodiments using an IgG antibody CH1 domain as the first association sustaining domain and using IgG antibody CL as the second association sustaining domain will be described.

[1056] A fusion polypeptide comprising the antigen binding domain of interest can be screened for from a library comprising a plurality of fusion polypeptides of antigen binding domains each linked to an IgG antibody CH1 domain.

[1057] In some embodiments, the present invention provides a library comprising a plurality of fusion polypeptides of antigen binding domains each linked to an IgG antibody CH1 domain, wherein the antigen binding domains include an antigen binding domain whose antigen binding activity is can be inhibited or could be lost by associating with particular VL, VH or VHH, and a method for screening the library for a fusion polypeptide comprising an antigen binding domain whose antigen binding activity can be inhibited or could be lost by associating with particular VL, VH or VHH.

[1058] In a particular embodiment, the present invention provides a method for screening for a fusion polypeptide comprising an antigen binding domain whose antigen binding activity can be inhibited or could be lost by associating with particular VL, from a library comprising a plurality of fusion polypeptides of antigen binding domains each linked to an IgG antibody CH1 domain. Specifically, the present invention provides a method for screening for an antigen binding domain, comprising the following steps:
[1059] (a) in vitro displaying the fusion polypeptides of the library according to the present invention;
[1060] (b) providing an association partner of an IgG antibody light chain constant region fused with the particular VL;
[1061] (c) associating the fusion polypeptides displayed in the step (a) with the association partner provided in the step (b) and selecting a fusion polypeptide that does not bind to the antigen or has antigen binding activity of a predetermined value or lower in a state where the antigen binding domain associates with the VL; and
[1062] (d) selecting, from the fusion polypeptides thus selected in the step (c), a fusion polypeptide that binds to the antigen or has antigen binding activity of a predetermined value or higher in a state where the antigen binding domain contained therein does not associate with the VL.

[1063] The association partner provided in the step (b) further comprises a protease cleavage sequence. In this case, in the step (d), the association of the antigen binding domain with the VL is canceled by protease treatment, and the antigen binding activity of the antigen binding domain may be confirmed in a state where the antigen binding domain does not associate with the VL. The protease cleavage sequence in the association partner is not limited by its position as long as the association of the antigen binding domain with the VL is canceled by cleavage. As an example of the position, the protease cleavage sequence may be located, for example, near the boundary between the VL and the IgG antibody light chain constant region in the association partner, preferably at any position between amino acid position 96 (Kabat numbering) of the VL and amino acid position 130 (EU numbering) (Kabat numbering position 130) of the antibody light chain constant region, more preferably at any position between amino acid position 104 (Kabat numbering) of the VL and amino acid position 113 (EU numbering) (Kabat numbering position 113) of the antibody light chain constant region.

[1064] Instead of using the association partner comprising a protease cleavage sequence, the protease cleavage sequence may be introduced into the fusion polypeptides in the library, and the fusion polypeptides can be cleaved by protease so that the association of the antigen binding domain with the VL is canceled. The protease cleavage sequence in each fusion polypeptide is not limited by its position as long as the association of the antigen binding domain with the VL is canceled by cleavage and the antigen binding domain retains its antigen binding activity even after the cleavage. As an example of the position, the protease cleavage sequence may be located, for example, near the boundary between the antigen binding domain and the IgG antibody CH1 domain in the fusion polypeptide.

[1065] In the step (d), the full lengths of the fusion polypeptides selected in the step (c) or their moieties comprising the antigen binding domains may be displayed again, and the antigen binding activity of the antigen binding domain can be confirmed in a state where the antigen binding domain does not associate with the VL.

[1066] In a particular embodiment, the present invention provides a method for screening for a fusion polypeptide comprising an antigen binding domain whose antigen binding activity can be inhibited or could be lost by associating with particular VH, from a library comprising a plurality of fusion polypeptides of antigen binding domains each linked to an IgG antibody light chain constant region. Specifically, the present invention provides a method for screening for a fusion polypeptide comprising an antigen binding domain, comprising the following steps:
[1067] (a) in vitro displaying the fusion polypeptides of the library according to the present invention;
[1068] (b) providing an association partner of an IgG antibody CH1 domain fused with the particular VH;
[1069] (c) associating the fusion polypeptides displayed in the step (a) with the association partner provided in the step (b) and selecting a fusion polypeptide that does not bind to the antigen or has antigen binding activity of a predetermined value or lower in a state where the antigen binding domain associates with the VH; and
[1070] (d) selecting, from the fusion polypeptides thus selected in the step (c), a fusion polypeptide that binds to the antigen or has antigen binding activity of a predetermined value or higher in a state where the antigen binding domain contained therein does not associate with the VH.

[1071] The association partner provided in the step (b) further comprises a protease cleavage sequence. In this case, in the step (d), the association of the antigen binding domain with the VH is canceled by protease treatment, and the antigen binding activity of the antigen binding domain may be confirmed in a state where the antigen binding domain does not associate with the VH. The protease cleavage sequence in the association partner is not limited by its position as long as the association of the antigen binding domain with the VH is canceled by cleavage. As an example of the position, the protease cleavage sequence may be located, for example, near the boundary between the VH and the IgG antibody CH1 domain in the association partner, preferably at any position between amino acid position 101 (Kabat numbering) of the VH and amino acid position 140 (EU numbering) of the antibody heavy chain constant region, more preferably at any position between amino acid position 109 (Kabat numbering) of the VH and amino acid position 122 (EU numbering) of the antibody heavy chain constant region.

[1072] Instead of using the association partner comprising a protease cleavage sequence, the protease cleavage sequence may be introduced into the fusion polypeptides in the library, and the fusion polypeptides can be cleaved by protease so that the association of the antigen binding domain with the VH is canceled. The protease cleavage sequence in each fusion polypeptide is not limited by its position as long as the association of the antigen binding domain with the VH is canceled by cleavage and the antigen binding domain retains its antigen binding activity even after the cleavage. As an example of the position, the protease cleavage sequence may be located, for example, near the boundary between the antigen binding domain and the IgG antibody light chain constant region in the fusion polypeptide.

[1073] In the step (d), the full lengths of the fusion polypeptides selected in the step (c) or their moieties comprising the antigen binding domains may be displayed again, and the antigen binding activity of the antigen binding domain can be confirmed in a state where the antigen binding domain does not associate with the VH.

[1074] An amino acid contained in each amino acid sequence described in the present invention may be posttranslationally modified (e.g., the modification of N-terminal glutamine to pyroglutamic acid by pyroglutamylation is a modification well known to those skilled in the art). Such an amino acid sequence containing the posttranslationally modified amino acid is also included in the amino acid sequence described in the present invention, as a matter of course.

[1075] It should be understood by those skilled in the art that arbitrary combinations of one or more embodiments described in the present specification are also included in the present invention unless there is technical contradiction on the basis of the technical common sense of those skilled in the art.

### EXAMPLES

[1076] Hereinafter, Examples of the method and the composition of the present invention will be described. It shall be understood that various other embodiments can be carried out in light of the general description mentioned above.

### Example 1: Problem of Existing Protease-Activated Antibody

[1077] A method for preparing an antibody that exerts antigen binding activity only through cleavage by protease expressed at a lesion site such as a cancer tissue or an inflammatory tissue has been reported. This antibody, called Probody, is an antibody molecule, as shown in FIG. 1, whose antigen binding activity is inhibited by connecting an antibody to a peptide masking the antigen binding site of the antibody via a linker that is cleaved by protease expressed at a lesion site (Non Patent Literature 18). The masking peptide is dissociated from the Probody by the cleavage of the constituent linker by the protease expressed at the target pathological site so that the resulting antibody molecule restores its antigen binding activity and becomes capable of binding to the antigen in the target pathological tissue.

[1078] It is believed that the Probody can bind to the antigen selectively at the target pathological site under the mechanism as mentioned above and thereby expand the therapeutic window. However, for the Probody, there may be the possibility that the antibody cleaved at the pathological site is capable of being brought back into blood from the pathological site and binds to the antigen expressed in normal tissue as a result of distributing the antibody to the normal tissues through blood flow, because the cleavage of the antibody by protease is irreversible. The Probody activated by protease retains a Fc region as in the Probody before the activation and therefore possesses a long circulation time in blood. Therefore, the antibody activated by protease expressed at a pathological site might circulate long in blood. Even protease expressed at an elevated level at a pathological site is also expressed at a low level in normal tissues, and free protease produced at a pathological site may be leaked into blood (The Chinese-German Journal of Clinical Oncology June 2004, Vol. 3, No. 2 P78-P80). Therefore, the Probody may be activated by such free protease. Hence, there may be a possibility that the Probody is activated at a site other than a pathological site. The Probody thus activated also circulates long in blood. Thus, there is a possibility that the Probody is continuously activated at a pathological site, in normal tissues, and in blood, and the activated Probody, if having a long circulation time in blood, accumulates in blood. The activated Probody accumulated in blood might exhibit adverse reactions by binding to the antigen expressed in normal tissues (FIG. 2).

[1079] The antigen binding activity of the Probody is inhibited by a masking peptide linked to an antibody via a linker, but is not completely inhibited. The Probody is in equilibrium between a state where the masking peptide linked via the linker is bound with the antigen binding site and a state where the masking peptide is dissociated. A molecule in the dissociated state can bind to the antigen (FIG. 3). In actuality, anti-EGFR Probody described in Non Patent Literature 17 has binding activity against EGFR even before protease cleavage of the linker. Although 30 to 100-fold rise in binding activity is seen by the protease cleavage of the linker, the Probody present at a high concentration before activation might exhibit adverse reactions by binding to the antigen expressed in normal tissues, because the Probody before activation has 1/30 to 1/100 of the binding activity of the activated Probody.

[1080] The Probody employs an artificial peptide for masking the antigen binding site of the antibody. The artificial peptide has a sequence absent in natural human proteins and might therefore has immunogenicity in humans Such immunogenicity is known to decrease the effects of antibody drugs by inducing anti-drug antibodies (Blood. 2016 Mar. 31; 127 (13): 1633-41).

[1081] Possible anti-drug antibodies against Probody are an anti-drug antibody against a complex of the antibody and the masking peptide (Probody before activation), an anti-drug antibody against the antibody dissociated from the masking peptide (activated Probody), an anti-drug antibody against the masking peptide (masking peptide dissociated from the activated Probody), and the like. Among them, the anti-drug antibody against the masking peptide (anti-masking peptide antibody) might bind to the masking peptide of Probody before activation and thereby activate the Probody without protease cleavage (FIG. 4). The Probody activated by the anti-masking peptide antibody might exhibit adverse reactions by binding to the antigen expressed in normal tissues.

### Example: 2 Concept of Protease-Activated Polypeptide Comprising Single-Domain Antibody

[1082] As shown in Example 1, the Probody technology presents the following problems:
[1083] 1. Probody activated by protease cleavage has a long circulation time in blood.
[1084] 2. Even Probody before protease cleavage has binding activity against the antigen.
[1085] 3. The masking peptide is an artificial non-human sequence and may induce an anti-masking peptide antibody.

[1086] The present inventors thought that a useful way for solving these problems and providing an antibody drug exerting activity at a pathological site is to satisfy the following conditions:
[1087] 1. An antigen binding domain activated by protease cleavage has a short half-life in blood.
[1088] 2. The antigen binding activity of a molecule before protease cleavage is minimized
[1089] 3. The masking peptide having an artificial non-human sequence is not used.

[1090] The present inventors devised a molecule shown in FIG. 5 as one example of a polypeptide that satisfied the conditions described above. The polypeptide with an antigen binding domain linked to a carrying moiety has a long half-life and does not bind to the antigen because the antigen binding activity of the antigen binding domain is inhibited (A). The antigen binding domain is released, and the antigen binding domain thus released restores its antigen binding activity and also has a short half-life (B).

[1091] The polypeptide shown in FIG. 5 has various variations. In the case of using an IgG antibody-like molecule, the polypeptide may be produced by a production method as illustrated in FIG. 6. First, a single-domain antibody (e.g., VH or VHH) binding to the target antigen is obtained (A). The obtained single-domain antibody is associated, as a substitute for one of VH and VL of an IgG antibody having a germline sequence, with the other one (VL or VH) to form an IgG antibody-like molecule (B). A protease cleavage sequence is introduced into the IgG antibody-like molecule (C). Examples of the introduction position include a position near the boundary between the harbored single-domain antibody (VH or VHH) and the constant region (CH1 or CL).

[1092] The single-domain antibody has antigen binding activity when existing alone, but loses its antigen binding activity upon formation of a variable region with VL, VH, VHH, or the like. VL or VH is a natural human antibody sequence having a germline sequence and therefore has a low risk of immunogenicity and is unlikely to induce an anti-drug antibody recognizing this VL or VH. In the case of forming a variable region of the single-domain antibody with VHH, the humanization of the VHH reduces the risk of immunogenicity and reduces the likelihood of inducing an anti-drug antibody recognizing this humanized VHH. The protease cleavage sequence inserted into the IgG antibody-like molecule is cleaved by protease so that the single-domain antibody is released. The released single-domain antibody has antigen binding activity. The IgG antibody-like molecule before protease cleavage is structurally similar to general IgG molecules and therefore has a long circulation time in blood, whereas the single-domain antibody released by protease cleavage has a molecular weight of approximately 13 kDa without retaining a Fc region and therefore disappears rapidly by renal excretion. In actuality, the half-life of full-length IgG is on the order of 2 to 3 weeks (Blood. 2016 Mar. 31; 127 (13): 1633-41), whereas the half-life of the single-domain antibody is approximately 2 hours (Antibodies 2015, 4 (3), 141-156). Hence, the antigen binding molecule activated by protease has a short half-life in blood and becomes unlikely to bind to the antigen in normal tissues.

[1093] When the single-domain antibody is VL, the same concept as above may be achieved, for example, by introducing the protease cleavage sequence to near the boundary between VL and CL.

### Example 3: Preparation of Protease-Activated Polypeptide Using VHH Binding to IL6R

[1094] 3-1 Preparation of Polypeptide with Incorporated VHH Binding to IL6R

[1095] An expression vector encoding IL6R90-G1m (SEQ ID NO: 2) containing IL6R90 (SEQ ID NO: 1), VHH having binding and neutralizing activities against human IL6R as described in International Publication No. WO2010/115998, fused with a human IgG1 constant region (CH1-hinge-CH2-CH3) was prepared by a method known to those skilled in the art.

[1096] Expression vectors encoding VK1-39-k0MT (SEQ ID NO: 3), VK2-28-k0MT (SEQ ID NO: 4), VK3-20-k0MT (SEQ ID NO: 5), VL1-40-lamL (SEQ ID NO: 6), VL1-44-lamL (SEQ ID NO: 7), VL2-14-lamL (SEQ ID NO: 8), VL3-21-lamL (SEQ ID NO: 9), k0 (SEQ ID NO: 10), and lamL (SEQ ID NO: 11) as light chains (variable region-constant region) of various subclasses having a human germline sequence were prepared by a method known to those skilled in the art.

[1097] IgG antibody-like molecules IL6R90-G1m/VK1-39-k0MT (heavy chain: SEQ ID NO: 2, light chain: SEQ ID NO: 3), IL6R90-G1m/VK2-28-k0MT (heavy chain: SEQ ID NO: 2, light chain: SEQ ID NO: 4), IL6R90-G1m/VK3-20-k0MT (heavy chain: SEQ ID NO: 2, light chain: SEQ ID NO: 5), IL6R90-G1m/VL1-40-lamL (heavy chain: SEQ ID NO: 2, light chain: SEQ ID NO: 6), IL6R90-G1m/VL1-44-lamL (heavy chain: SEQ ID NO: 2, light chain: SEQ ID NO: 7), IL6R90-G1m/VL2-14-lamL (heavy chain: SEQ ID NO: 2, light chain: SEQ ID NO: 8), IL6R90-G1m/VL3-21-lamL (heavy chain: SEQ ID NO: 2, light chain: SEQ ID NO: 9), IL6R90-G1m/k0 (heavy chain: SEQ ID NO: 2, light chain: SEQ ID NO: 10), and IL6R90-G1m/lamL (heavy chain: SEQ ID NO: 2, light chain: SEQ ID NO: 11) were expressed by transient expression using FreeStyle 293 cells (Invitrogen Corp.) by a method known to those skilled in the art, and purified by a method known to those skilled in the art using protein A.

3-2 IL6R Binding Evaluation of Polypeptide with Incorporated VHH Binding to Human IL6R

[1098] IL6R90-G1m/VK1-39-k0MT, IL6R90-G1m/VK2-28-k0MT, IL6R90-G1m/VK3-20-k0MT, IL6R90-G1m/VL1-40-lamL, IL6R90-G1m/VL1-44-lamL, IL6R90-G1m/VL2-14-lamL, IL6R90-G1m/VL3-21-lamL, IL6R90-G1m/k0, and IL6R90-G1m/lamL were evaluated for their binding activity against human IL6R by the following method.

[1099] Recombinant human IL6R used as an antigen was prepared as follows: a CHO line stably expressing soluble human IL-6R (hereinafter, also referred to as hsIL-6R, IL6R or IL-6R) consisting of an amino acid sequence from positions 1 to 357 counted from the N terminus as reported in J. Immunol. 152, 4958-4968 (1994) was constructed by a method known to those skilled in the art, cultured, and caused to express hsIL-6R. From the obtained culture supernatant, hsIL-6R was purified by 2 steps of Blue Sepharose 6 FF column chromatography and gel filtration column chromatography. A fraction eluted as a main peak in the final step was used as a final purified product.

[1100] The hsIL-6R binding evaluation of each molecule was conducted using Octet HTX (Pall ForteBio Corp.). Specifically, each molecule was bound to Biosensor/Protein A (ProA) (Pall ForteBio Corp., 18-5013), and hsIL-6R was allowed to act thereon, followed by binding evaluation at 30 degrees C. Sensorgrams showing continuous responses measured using Octet HTX are shown in FIG. 10. IL6R90-G1m/k0 and IL6R90-G1m/lamL lacking VL bound to hsIL-6R, whereas IL6R90-G1m/VK1-39-k0MT, IL6R90-G1m/VK2-28-k0MT, IL6R90-G1m/VK3-20-k0MT, IL6R90-G1m/VL1-40-lamL, IL6R90-G1m/VL1-44-lamL, and IL6R90-G1m/VL2-14-lamL containing a variable region formed with VL were shown to be unable to bind to hsIL-6R. From this, it was found that VHH having binding activity against human IL6R can lose its IL6R binding activity by forming a variable region through association with VL.

3-3 Introduction of Protease Cleavage Sequence to Polypeptide with Incorporated VHH Binding to IL6R

[1101] A protease cleavage sequence was inserted to near the boundary between the anti-human IL6R VHH IL6R90 and CH1. Six types of heavy chains shown in FIG. 11 were designed such that peptide sequence A (SEQ ID NO: 12), a reported sequence cleavable by cancer-specifically expressed urokinase (uPA) and MT-SP1, was inserted at 3 sites near the boundary between IL6R90 and CH1 with or without a glycine-serine linker. Expression vectors encoding IL6R90H1001 (SEQ ID NO: 13), IL6R90H1002 (SEQ ID NO: 14), IL6R90H1003 (SEQ ID NO: 15), IL6R90H1004 (SEQ ID NO: 16), IL6R90H1005 (SEQ ID NO: 17), and IL6R90H1006 (SEQ ID NO: 18) were prepared by a method known to those skilled in the art.

[1102] IgG antibody-like molecules IL6R90H1001/VK1-39-k0MT (heavy chain: SEQ ID NO: 13, light chain: SEQ ID NO: 3), IL6R90H1002/VK1-39-k0MT (heavy chain: SEQ ID NO: 14, light chain: SEQ ID NO: 3), IL6R90H1003/VK1-39-k0MT (heavy chain: SEQ ID NO: 15, light chain: SEQ ID NO: 3), IL6R90H1004/VK1-39-k0MT (heavy chain: SEQ ID NO: 16, light chain: SEQ ID NO: 3), IL6R90H1005/VK1-39-k0MT (heavy chain: SEQ ID NO: 17, light chain: SEQ ID NO: 3), and IL6R90H1006/VK1-39-k0MT (heavy chain: SEQ ID NO: 18, light chain: SEQ ID NO: 3) were expressed by transient expression using these heavy chains and VK1-39-k0MT (SEQ ID NO: 3) as light chain and using FreeStyle 293 cells (Invitrogen Corp.) by a method known to those skilled in the art, and purified by a method known to those skilled in the art using protein A.

### 3-4 Activation of Polypeptide Harboring Protease Cleavage Sequence by Protease Cleavage

[1103] Whether IL6R90H1001/VK1-39-k0MT, IL6R90H1002/VK1-39-k0MT, IL6R90H1003/VK1-39-k0MT, IL6R90H1004/VK1-39-k0MT, IL6R90H1005/VK1-39-k0MT, and IL6R90H1006/VK1-39-k0MT would release VHH having binding activity against IL6R by protease cleavage was verified.

[1104] Soluble human IL6R was prepared by a method known to those skilled in the art. The prepared soluble human IL6R was biotinylated by a method known to those skilled in the art.

[1105] For the purpose of attaching biotin to the C terminus of soluble human IL-6R (also referred to as hsIL-6R or soluble human IL6R; SEQ ID NO: 35), a gene fragment encoding a specific sequence (AviTag sequence; SEQ ID NO: 36) to be biotinylated by biotin ligase was linked via a gene fragment encoding a linker to downstream of a gene fragment encoding hsIL-6R. A gene fragment encoding a protein containing hsIL-6R linked to the AviTag sequence (hsIL-6R-Avitag; SEQ ID NO: 37) was integrated to a vector for expression in animal cells. The constructed plasmid vector was transfected to FreeStyle 293 cells (Invitrogen Corp.) using 293Fectin (Invitrogen Corp.). In this operation, the cells were cotransfected with a gene for EBNA1 (SEQ ID NO: 57) expression and a gene for biotin ligase (BirA; SEQ ID NO: 58) expression, and biotin was further added thereto for the purpose of biotin-labeling hsIL-6R-Avitag. The cells transfected according to the procedures mentioned above were cultured at 37 degrees C. under 8% CO₂ and the protein of interest (hsIL-6R-BAP1) was secreted into the culture supernatant. This cell culture solution was filtered through a 0.22 micro m bottle-top filter to obtain a culture supernatant.

[1106] An anti-human IL-6R antibody was immobilized on HiTrap NHS-activated HP (GE Healthcare Japan Corp.) according to the protocol of the manufacturer to prepare a column (anti-human IL-6R antibody column). The culture supernatant was applied to the anti-human IL-6R antibody column equilibrated with TBS, followed by the elution of the bound hsIL-6R with 2 M arginine (pH 4.0). Next, the eluate from the anti-human IL-6R antibody column was diluted with TBS and then applied to SoftLink Avidin column (Promega Corp.) equilibrated with TBS, followed by the elution of hsIL-6R-BAP1 with 5 mM biotin, 50 mM Tris-HCl (pH 8.0) and 2 M arginine (pH 4.0). From this eluate, aggregates of hsIL-6R-BAP1 were removed by gel filtration chromatography using Superdex 200 (GE Healthcare Japan Corp.) to obtain purified hsIL-6R-BAP1 with the buffer exchanged with D-PBS and 0.05% CHAPS.

[1107] Recombinant Human Matriptase/ST14 Catalytic Domain (R&D Systems, Inc., 3946-SE-010) was used as the protease. 12.5 nM protease and 100 micro g/mL of each IgG antibody-like molecule were incubated in PBS under a condition of 37 degrees C. for 20 hours. Then, cleavage by the protease was evaluated by reducing SDS-PAGE. The results are shown in FIG. 12. As a result, the protease cleavage of the protease cleavage sequence near the boundary between the VHH and the heavy chain constant region was confirmed in IL6R90H1002/VK1-39-k0MT, IL6R90H1004/VK1-39-k0MT, IL6R90H1005/VK1-39-k0MT, and IL6R90H1006/VK1-39-k0MT.

[1108] Next, the IL6R binding evaluation of VHH released by protease treatment was conducted using Octet HTX (Pall ForteBio Corp.). Specifically, hsIL-6R-BAP1 was bound to a streptavidin sensor (Pall ForteBio Corp., 18-5021), and each cleaved IgG antibody-like molecule was allowed to act thereon, followed by binding evaluation at 30 degrees C. Sensorgrams showing continuous responses measured using Octet HTX are shown in FIG. 13. As a result, the binding was confirmed in IL6R90H1002/VK1-39-k0MT, IL6R90H1004/VK1-39-k0MT, IL6R90H1005/VK1-39-k0MT, and IL6R90H1006/VK1-39-k0MT. IL6R90-G1m/k0 and IL6R90-G1m/lamL divalently bound with avidity, whereas the released VHH bound with affinity. Therefore, the protease-treated IL6R90H1002/VK1-39-k0MT, IL6R90H1004/VK1-39-k0MT, IL6R90H1005/VK1-39-k0MT, and IL6R90H1006/VK1-39-k0MT exhibited a faster dissociation rate from IL6R than that of IL6R90-G1m/k0 and IL6R90-G1m/lamL Also, the VHH had a smaller molecular weight than that of IL6R90-G1m/k0 and IL6R90-G1m/lamL Therefore, its response was lower.

[1109] These results demonstrated that IL6R90H1002/VK1-39-k0MT, IL6R90H1004/VK1-39-k0MT, IL6R90H1005/VK1-39-k0MT, or IL6R90H1006/VK1-39-k0MT does not exhibit binding activity against IL6R as is, whereas the peptide sequence A inserted near the boundary between the VHH and the heavy chain constant region is cleaved by protease treatment so that the VHH domain is released, and the released VHH can bind to IL6R. From this, it was concluded that the molecule conforming to the concept described in Example 2 was actually able to be prepared.

### Example 4: Preparation of Protease-Activated Polypeptide by Alteration Using VHH Binding to IL6R

[1110] 4-1. IL6R Binding Evaluation of Polypeptide with Incorporated VHH Binding to IL6R

[1111] An expression vector encoding 20A11-G1m (SEQ ID NO: 38) containing 20A11 (SEQ ID NO: 19), VHH having binding and neutralizing activities against IL6R as described in International Publication No. WO2010/115998, fused with a human IgG1 constant region (CH1-hinge-CH2-CH3) in the same way as in Example 3 was prepared by a method known to those skilled in the art.

[1112] Polypeptides 20A11-G1m/VK1-39-k0MT, 20A11-G1m/VK2-28-k0MT, 20A11-G1m/VK3-20-k0MT, 20A11-G1m/VL1-40-lamL, 20A11-G1m/VL1-44-lamL, 20A11-G1m/VL2-14-lamL, and 20A11-G1m/VL3-21-lamL were expressed and purified in the same way as in Example 3 using this heavy chain and VK1-39-k0MT (SEQ ID NO: 3), VK2-28-k0MT (SEQ ID NO: 4), VK3-20-k0MT (SEQ ID NO: 5), VL1-40-lamL (SEQ ID NO: 6), VL1-44-lamL (SEQ ID NO: 7), VL2-14-lamL (SEQ ID NO: 8), and VL3-21-lamL (SEQ ID NO: 9) as light chains.

[1113] The obtained 20A11-G1m/VK1-39-k0MT (heavy chain: SEQ ID NO: 38, light chain: SEQ ID NO: 3), 20A11-G1m/VK2-28-k0MT (heavy chain: SEQ ID NO: 38, light chain: SEQ ID NO: 4), 20A11-G1m/VK3-20-k0MT (heavy chain: SEQ ID NO: 38, light chain: SEQ ID NO: 5), 20A11-G1m/VL1-40-lamL (heavy chain: SEQ ID NO: 38, light chain: SEQ ID NO: 6), 20A11-G1m/VL1-44-lamL (heavy chain: SEQ ID NO: 38, light chain: SEQ ID NO: 7), 20A11-G1m/VL2-14-lamL (heavy chain: SEQ ID NO: 38, light chain: SEQ ID NO: 8), and 20A11-G1m/VL3-21-lamL (heavy chain: SEQ ID NO: 38, light chain: SEQ ID NO: 9) were evaluated for their binding to IL6R in the same way as in Example 3. The results are shown in FIG. 14. As a result, none of the light chains used in this Example inhibited the IL6R binding activity of 20A11 by associating with the heavy chain containing the 20A11 fused with the human germline IgG1 constant region (CH1-hinge-CH2-CH3).

[1114] This is probably because 20A11 did not form a stable variable region with VL used in this Example.

4-2. Introduction of Amino Acid Alteration to Interface Site Between VHH and VL in Polypeptide with Incorporated VHH not Losing Antigen Binding

[1115] In order to form a stable variable region between 20A11 and VL, mutations were introduced to amino acids present at the interface between the 20A11 and the VL. An expression vector encoding 20A11hu-G1m (SEQ ID NO: 39) containing 20A11hu (derived from 20A11 by the introduction of mutations to substitute F at position 37 by V (F37V), R at position 45 by L, and G at position 47 by W (all according to the Kabat numbering)) (SEQ ID NO: 20) fused with a human IgG1 constant region (CH1-hinge-CH2-CH3) in the same way as in Example 3 was prepared by a method known to those skilled in the art.

[1116] Polypeptides 20A11hu-G1m/VK1-39-k0MT (heavy chain: SEQ ID NO: 39, light chain: SEQ ID NO: 3), 20A11hu-G1m/VK2-28-k0MT (heavy chain: SEQ ID NO: 39, light chain: SEQ ID NO: 4), 20A11hu-G1m/VK3-20-k0MT (heavy chain: SEQ ID NO: 39, light chain: SEQ ID NO: 5), 20A11hu-G1m/VL1-40-lamL (heavy chain: SEQ ID NO: 39, light chain: SEQ ID NO: 6), 20A11hu-G1m/VL1-44-lamL (heavy chain: SEQ ID NO: 39, light chain: SEQ ID NO: 7), 20A11hu-G1m/VL2-14-lamL (heavy chain: SEQ ID NO: 39, light chain: SEQ ID NO: 8), and 20A11hu-G1m/VL3-21-lamL (heavy chain: SEQ ID NO: 39, light chain: SEQ ID NO: 9) were expressed and purified in the same way as in Example 3 using this heavy chain and VK1-39-k0MT (SEQ ID NO: 3), VK2-28-k0MT (SEQ ID NO: 4), VK3-20-k0MT (SEQ ID NO: 5), VL1-40-lamL (SEQ ID NO: 6), VL1-44-lamL (SEQ ID NO: 7), VL2-14-lamL (SEQ ID NO: 8), and VL3-21-lamL (SEQ ID NO: 9) as light chains.

4-3. IL6R Binding Evaluation of Polypeptide with Incorporated VHH Containing Amino Acid Alteration at Interface Site Between the VHH and VL

[1117] The obtained 20A11hu-G1m/VK1-39-k0MT, 20A11hu-G1m/VK2-28-k0MT, 20A11hu-G1m/VK3-20-k0MT, 20A11hu-G1m/VL1-40-lamL, 20A11hu-G1m/VL1-44-lamL, 20A11hu-G1m/VL2-14-lamL, and 20A11hu-G1m/VL3-21-lamL were evaluated for their binding to IL6R at 30 degrees C. or 25 degrees C. in the same way as in Example 3. The results are shown in FIG. 15.

[1118] As a result, 20A11hu-G1m/VK1-39-k0MT, 20A11hu-G1m/VK2-28-k0MT, 20A11hu-G1m/VK3-20-k0MT, 20A11hu-G1m/VL1-40-lamL, 20A11hu-G1m/VL1-44-lamL, and 20A11hu-G1m/VL2-14-lamL were shown to be unable to bind to IL6R.

[1119] These results demonstrated that the VHH 20A11, which did not lose its IL6R binding activity by associating with VL, used in Example 3, can form a stable variable region with VL and can lose its IL6R binding activity, by converting amino acids present at the interface site between the VHH and the VL to 37V, 45L, and 47W (Kabat numbering) and thereby altering the 20A11 to 20A11hu.

4-4. Introduction of Protease Cleavage Sequence to Polypeptide with Incorporated VHH Containing Amino Acid Alteration at Interface Site Between the VHH and VL

[1120] Heavy chains 20A11huH1001 (SEQ ID NO: 40), 20A11huH1002 (SEQ ID NO: 41), 20A11huH1004 (SEQ ID NO: 42), and 20A11huH1006 (SEQ ID NO: 43) were prepared in the same way as in Example 3 such that a protease cleavage sequence (SEQ ID NO: 12) or a protease cleavage sequence linked to a flexible linker (SEQ ID NO: 44) was inserted near the boundary between 20A11hu and CH1.

[1121] Polypeptides 20A11huH1001/VK1-39-k0MT (heavy chain: SEQ ID NO: 40, light chain: SEQ ID NO: 3), 20A11huH1002/VK1-39-k0MT (heavy chain: SEQ ID NO: 41, light chain: SEQ ID NO: 3), 20A11huH1004/VK1-39-k0MT (heavy chain: SEQ ID NO: 42, light chain: SEQ ID NO: 3), and 20A11huH1006/VK1-39-k0MT (heavy chain: SEQ ID NO: 43, light chain: SEQ ID NO: 3) were expressed and purified in the same way as in Example 3 using these heavy chains and VK1-39-k0MT (SEQ ID NO: 3) as a light chain.

### 4-5. Activation of Polypeptide Harboring Protease Cleavage Sequence by Protease Cleavage

[1122] 20A11huH1001/VK1-39-k0MT, 20A11huH1002/VK1-39-k0MT, 20A11huH1004/VK1-39-k0MT, and 20A11huH1006/VK1-39-k0MT were cleaved by protease in the same way as in Example 3, and the degree of the cleavage was evaluated by reducing SDS-PAGE. The results are shown in FIG. 16.

[1123] As a result, 20A11huH1002/VK1-39-k0MT, 20A11huH1004/VK1-39-k0MT, and 20A11huH1006/VK1-39-k0MT were confirmed to undergo protease cleavage near the boundary between VHH and CH1.

[1124] Next, the IL6R binding evaluation of VHH released by protease treatment was conducted at 30 degrees C. or 25 degrees C. in the same way as in Example 3. Octet sensorgrams are shown in FIG. 17.

[1125] As a result, the IL6R binding was confirmed in 20A11huH1002/VK1-39-k0MT, 20A11huH1004/VK1-39-k0MT, and 20A11huH1006/VK1-39-k0MT confirmed to undergo cleavage near the boundary between VHH and CH1 by protease treatment.

[1126] These results demonstrated that even if VHH incorporated in a polypeptide does not lose its antigen binding activity immediately after association with particular VL, the antigen binding activity can be lost by introducing an association promoting mutation to an amino acid present at the interface between the VHH and the VL.

[1127] From these results, it was concluded that the molecule conforming to the concept described in Example 2 can also be prepared by a method of combining a light chain with VHH containing a substituted amino acid involved in association with the light chain, in addition to the method of combining a light chain with VHH obtained in advance as in Example 3.

### Example 5: Preparation of Protease-Activated Polypeptide Using VHH Derived from Immunized Alpaca

[1128] 5-1. Obtainment of VHH Derived from Immunized Alpaca

[1129] Alpacas were immunized with IL6R, CD3 or plexin A1 by a method known to those skilled in the art. 4 and 8 weeks later, PBMC was corrected. From the corrected PBMC, VHH gene was amplified with reference to a method described in J. Immunol. Methods (2007) 324, 13. The amplified VHH gene fragment was connected with gene 3 gene and inserted into a phagemid vector. The phagemid vector having the insert of the VHH fragment was transferred to E. coli by the electroporation method, and phages displaying g VHH were obtained by a method already known to those skilled in the art. The obtained phages were evaluated for their binding to IL6R, CD3 or plexin A1 by ELISA. The sequence of a bound clone was analyzed by a method known to those skilled in the art to identify VHH binding to the antigen.

### 5-2. Enrichment of VHH Binding to CD3

[1130] VHH binding to human CD3 was identified from the VHH library constructed in Example 5-1. VHH clones having binding capacity against human CD3 were enriched using a biotin-labeled protein containing human CD3 epsilon and human CD3 delta linked to a human antibody constant region (human CD3ed-Fc) as an antigen. The human CD3ed-Fc was prepared as follows: an expression vector for animal cells having a gene encoding the amino acid sequence represented by SEQ ID NO: 59, a gene encoding the amino acid sequence represented by SEQ ID NO: 60 and a gene encoding BirA (SEQ ID NO: 58) was transferred to FreeStyle 293 cells (Invitrogen Corp.). After the transfer, L-biotin was added thereto, and biotinylation was carried out in a culture solution. Cell culture was performed by shake culture at 37 degrees C. according to the protocol. 4 to 5 days later, the supernatant was recovered. From the supernatant, a protein fused with the antibody constant region was obtained using a protein A column (Eshmuno A (Merck KGaA)). For the purpose of further obtaining only a CD3 epsilon delta heterodimer, a fraction of the CD3 epsilon delta heterodimer fused with the antibody constant region (referred to as human CD3ed-Fc) was separated using Anti-FLAG M2 column. Subsequently, gel filtration chromatography (Superdex 200, GE Healthcare Japan Corp.) was carried out to obtain the fraction of the CD3 epsilon delta heterodimer of interest (referred to as human CD3ed-Fc).

[1131] Phage production was performed from E. coli retaining the constructed phagemids for phage display. A phage population was precipitated by the addition of 2.5 M NaCl/10% PEG to the culture solution of the E. coli after the phage production, and then diluted with TB S to obtain a phage library solution. Next, BSA was added to the phage library solution so as to attain a final BSA concentration of 4% Panning was performed with reference to a general panning method using an antigen immobilized on magnetic beads (J. Immunol. Methods. (2008) 332 (1-2), 2-9; J. Immunol. Methods. (2001) 247 (1-2), 191-203; Biotechnol. Frog. (2002) 18 (2) 212-20; and Mol. Cell Proteomics (2003) 2 (2), 61-9). The magnetic beads used were NeutrAvidin coated beads (FG beads NeutrAvidin) or Streptavidin coated beads (Dynabeads MyOne Streptavidin T1).

[1132] Specifically, 100 pmol of the biotin-labeled antigen was added to the prepared phage library solution, and the phage library solution was contacted with the antigen at room temperature for 60 minutes. The magnetic beads blocked with BSA were added thereto, and the complexes of the antigen and the phages were bound to the magnetic beads at room temperature for 15 minutes. The beads were washed twice with 0.5 mL of TBST (TBS containing 0.1% Tween 20; TBS was manufactured by Takara Bio Inc.) and then further washed once with 0.5 mL of TBS. Then, 0.5 mL of 1 mg/mL trypsin was added thereto, and the beads were suspended at room temperature for 15 minutes and immediately thereafter, separated using a magnetic stand to recover a phage solution. The recovered phage solution was added to 20 mL of an E. coli line ER2738 in an exponential stage of growth (OD600: 0.4-0.5). The E. coli was cultured with mild stirring at 37 degrees C. for 1 hour and thereby infected by the phages. The infected E. coli was inoculated to a 225 mm×225 mm plate. Next, the phages were recovered from the culture supernatant of the inoculated E. coli to prepare a phage library solution. This cycle, called panning, was repeated a total of twice. In the second cycle of panning, the beads were washed three times with TBST and subsequently twice with TBS. Also, 4 nmol of human Fc was added when the human CD3ed-Fc contacted with phages.

5-3. Preparation of Protease-Activated IgG Antibody-Like Molecule with Incorporated VHH Binding to CD3

[1133] A nucleotide sequence encoding the VHH sequence (Table 1) of each binding clone for human CD3 obtained in Example 5-1 or 5-2 was connected to a nucleotide sequence encoding a protease cleavage site and a constant region by the method described in Example 3 and inserted into an expression vector for animal cells. The resultant was used as the heavy chain of an IgG antibody-like molecule.

TABLE 1
VHH binding to human CD3

| VHH | SEQ ID NO |
|---|---|
| bC3edL1R1N160H01 | 61 |
| bC3edL1R1N161H01 | 62 |
| bC3edL1R1N164H01 | 63 |

[1134] Protease-activated IgG antibody-like molecules shown in Table 2 below were expressed by transient expression using FreeStyle 293 cells (Invitrogen Corp.) by a method known to those skilled in the art, and purified by a method known to those skilled in the art using protein A.

TABLE 2
Protease-activated IgG antibody-like molecules
with incorporated VHH binding to CD3

| | SEQ ID NO of | SEQ ID NO of |
|---|---|---|
| IgG antibody-like molecule | heavy chain | light chain |
| bC3edL1R1N160H01-G1mISHI01/ | 64 | 3 |
| VK1-39-k0MT | | |
| bC3edL1R1N161H01-G1mISHI01/ | 65 | |
| VK1-39-k0MT | | |
| bC3edL1R1N164H01-G1mISHI01/ | 66 | |
| VK1-39-k0MT | | |

### 5-4. Activation of Protease-Activated IgG Antibody-Like Molecule by Protease Cleavage

[1135] The IgG antibody-like molecules prepared in Example 5-3 were cleaved by protease in the same way as in Example 3, and the degree of the cleavage was evaluated by reducing SDS-PAGE. The results are shown in FIG. 18. The protease concentration was set to 25 nM, and Octet RED (Pall ForteBio Corp.) was used in the assay.

[1136] As a result, the IgG antibody-like molecules were confirmed to undergo protease cleavage at the protease cleavage sequence.

[1137] Next, the CD3 binding evaluation of VHH released by protease treatment was conducted in the same way as in Example 3. Octet sensorgrams are shown in FIG. 19.

[1138] As a result, the IgG antibody-like molecules bC3edL1R1N160H01-G1mISHI01/VK1-39-k0MT, bC3edL1R1N161H01-G1mISHI01/VK1-39-k0MT, and bC3edL1R1N164H01-G1mISHI01/VK1-39-k0MT did not exhibit antigen binding before the protease treatment, whereas the antigen binding was confirmed after the protease treatment. The plurality of VHH molecules binding to CD3 molecules, obtained in the same way as in the VHH described in Table 1, was also used to prepare an IgG-like molecule containing the same protease cleavage site as in the IgG antibody-like molecules described in Table 2. As a result, the antigen binding was confirmed by protease treatment. These results demonstrated that in addition to the polypeptides shown in Examples 3 and 4, an IgG antibody-like molecule harboring a protease cleavage sequence can undergo cleavage at the protease cleavage sequence by protease treatment and thereby release the antigen binding domain, and the released antigen binding domain can bind to the antigen.

### Example 6: Polypeptide Harboring Protease Cleavage Sequence in its Light Chain

[1139] Light chains VK1-39P-2-Pk0MT (SEQ ID NO: 67), VK1-39P-1-Pk0MT (SEQ ID NO: 68), VK1-39P-Pk0MT (SEQ ID NO: 69), VK1-39P+2-Pk0MT (SEQ ID NO: 70), VK1-39P+3-Pk0MT (SEQ ID NO: 71), VK1-39P+4-Pk0MT (SEQ ID NO: 72), and VK1-39P+5-Pk0MT (SEQ ID NO: 73) harboring a protease cleavage sequence at each position were prepared in the same way as in Example 3.

[1140] IgG antibody-like molecules were expressed and purified in the same way as in Example 3 using these light chains and IL6R90-G1m (SEQ ID NO: 2) as a heavy chain. The protease concentration was set to 25 nM. IL6R90-G1m/VK1-39-k0MT (heavy chain: SEQ ID NO: 2, light chain: SEQ ID NO: 3) was used as an IgG antibody-like molecule harboring no cleavage sequence.

[1141] Subsequently, the prepared IgG antibody-like molecules were cleaved by protease in the same way as in Example 3, and the degree of the cleavage was evaluated by reducing SDS-PAGE. The results are shown in FIG. 20. As a result, VK1-39P+2-Pk0MT (SEQ ID NO: 70), VK1-39P+3-Pk0MT (SEQ ID NO: 71), VK1-39P+4-Pk0MT (SEQ ID NO: 72), and VK1-39P+5-Pk0MT (SEQ ID NO: 73) were confirmed to undergo protease cleavage at the protease cleavage sequence. The IL6R binding evaluation of VHH exposed by protease treatment was further conducted in the same way as in Example 3. Octet sensorgrams are shown in FIG. 21. As a result, the binding was also confirmed by the protease treatment of the cleavage sequence introduced into the light chain, demonstrating that a protease-activated polypeptide harboring a protease cleavage sequence in its light chain can be obtained such that the antigen binding domain is exposed to exhibit antigen binding capacity by the protease cleavage of the light chain.

### Example 7: Library Containing Heavy Chain Having Antigen Binding Domain and Light Chain Harboring Protease Cleavage Sequence, and Obtainment of Protease-Activated Polypeptide by Phage Display Method from the Library

[1142] As confirmed in Example 6, even when a protease cleavage sequence is introduced into the light chain of a protease-activated polypeptide, the antigen binding domain is exposed after cleavage of the light chain to bind to the antigen.

[1143] Accordingly, a heavy chain containing an antigen binding domain such as a single-domain antibody and a light chain harboring a protease cleavage sequence are incorporated in a phagemid and presented by a phage. A plurality of phagemids for phage display containing different types of antigen binding domains are constructed, followed by phage production from E. coli retaining these phagemids. A phage population is precipitated by the addition of 2.5 M NaCl/10% PEG to the culture solution of the E. coli after the phage production, and then diluted with TBS to obtain a phage library solution. BSA is added to the phage library solution so as to attain a final BSA concentration of 4%.

[1144] The protease-activated polypeptide is obtained by panning from the phage library thus prepared. The panning is performed with reference to a general panning method using an antigen immobilized on magnetic beads (J. Immunol. Methods. (2008) 332 (1-2), 2-9; J. Immunol. Methods. (2001) 247 (1-2), 191-203; Biotechnol. Frog. (2002) 18 (2) 212-20; and Mol. Cell Proteomics (2003) 2 (2), 61-9). Phages unbound with the antigen-immobilized magnetic beads are recovered before addition of protease, and phages bound with the antigen-immobilized magnetic beads are recovered after addition of protease. The magnetic beads used are NeutrAvidin coated beads (Sera-Mag SpeedBeads NeutrAvidin-coated, FG beads NeutrAvidin) or Streptavidin coated beads (Dynabeads M-280 Streptavidin). An antigen binding clone may be selected from the recovered phages by phage ELISA described in the preceding section, or the antibody gene is subcloned into a vector for expression in animals and expressed using animal cells, and the binding activity is compared between before and after protease treatment to select a binding clone.

### Example 8: Library Containing Heavy Chain Having Antigen Binding Domain and Light Chain, and Obtainment of Heavy Chain Whose Antigen Binding Capacity is Controlled by Light Chain by Phage Display Method from the Library

[1145] As confirmed in Example 3, the antigen binding capacity of a heavy chain containing an antigen binding domain is controlled by the association of a light chain. Accordingly, a heavy chain that loses its antigen binding capacity when associated with a light chain and exhibits antigen binding capacity when presented alone or in combination with a light chain constant region is obtained by the phage display method.

[1146] A heavy chain containing an antigen binding domain such as a single-domain antibody is incorporated in a phagemid and presented by a phage. A plurality of phagemids for phage display containing different types of antigen binding domains are constructed, followed by phage production from E. coli retaining these phagemids. A phage population is precipitated by the addition of 2.5 M NaCl/10% PEG to the culture solution of the E. coli after the phage production, and then diluted with TBS to obtain a phage library solution. BSA is added to the phage library solution so as to attain a final BSA concentration of 4%.

[1147] The heavy chain that exhibits antigen binding capacity when presented alone or in combination with a light chain constant region and loses its antigen binding capacity when associated with the light chain variable region is obtained by panning from the phage library thus prepared. The panning is performed with reference to the panning method using an antigen immobilized on magnetic beads described in Example 5. Phages bound with the antigen-immobilized magnetic beads are recovered from the phage library displaying heavy chains or heavy chains with light chain constant regions. The recovered phages are allowed to infect E. coli, and phages displaying heavy and light chains are produced using a helper phage expressing a light chain. Phages displaying a heavy chain containing an antigen binding domain and a light chain are obtained by the method mentioned above from the culture solution of the E. coli after the phage production. Phages unbound with the antigen-immobilized magnetic beads are recovered from the population of phages displaying heavy and light chains.

[1148] As shown in FIG. 9D, the panning may be carried out by changing the order of the recovery of a phage population displaying a heavy chain, either alone or in combination with a light chain constant region, binding to antigen-immobilized magnetic beads, and the recovery of a phage population displaying heavy and light chains without binding to antigen-immobilized magnetic beads. In addition to the method of expressing a light chain using a helper phage, a region encoding a light chain and a region encoding a heavy chain may be incorporated to the same phagemid as usual, and a gene encoding only a light chain constant region or a full-length light chain may be incorporated in each cycle of panning and used.

[1149] An antigen binding clone may be selected from the recovered phages by phage ELISA described in the preceding section, or the antibody gene is subcloned into a vector for expression in animals and expressed using animal cells, and the binding activity is compared between before and after protease treatment to select a binding clone.

### Example 9: Obtainment of VHH Whose Antigen Binding Capacity is Controlled by Light Chain by Use of Phage Display Method, and Preparation of IgG Antibody-Like Molecule Containing the VHH

[1150] In Example 3, it was confirmed that the antigen binding capacity of VHH contained as a substitute for VH in a heavy chain is controlled by association with a light chain. Accordingly, VHH that lost its antigen binding capacity when associated with a particular light chain and exhibited antigen binding capacity when the heavy chain was presented alone or in combination with a light chain constant region, i.e., when not associated with a light chain variable region, was obtained from a phage library displaying CH1 linked to VHH derived from immunized alpaca PBMC. An IgG antibody-like molecule containing the VHH was prepared.

9-1. Construction of Light Chain-Expressing Helper Phage with Integrated Light Chain Expression Unit

[1151] On the basis of a method described in International Publication No. WO2015/046554, a promoter, a signal sequence, antibody light chain variable region and light chain constant region genes or a light chain constant region gene, etc. were integrated into the genome of a helper phage to construct a light chain-expressing helper phage. E. coli infected with this helper phage is capable of expressing the antibody light chain variable region and the light chain constant region, or only the light chain constant region.

[1152] Specifically, the genome was extracted from a helper phage M13KO7TC constructed by the method described in International Publication No. WO2015/046554, and a light chain expression unit was introduced to the genome. A gene encoding a light chain variable region and a light chain constant region (VK1-39-k0MTdC; SEQ ID NO: 152), or a gene encoding a light chain constant region (k0MTdC; SEQ ID NO: 153) was used as the light chain gene to be introduced. lac promoter-pelB signal sequence-light chain gene was inserted into M13KO7TC/SacI by the method described above and transferred to an E. coli line ER2738 by the electroporation method.

[1153] The obtained E. coli was cultured, and 2.5 M NaCl/10% PEG was added to the culture supernatant to purify helper phages by the PEG precipitation method. The titers of the obtained helper phages M13KO7TC-Vk1-39-k0MTdC and M13KO7TC-k0MTdC were confirmed by the general plaque formation method.

### 9-2. Preparation of Library Containing a Plurality of VHH-CH1 Molecules

[1154] Alpacas were immunized by a method known to those skilled in the art using 4 types of immunogens: a human IL6R extracellular domain, a human CD3epsilongamma heterodimer, a monkey CD3epsilongamma heterodimer and a cell domain of human plexin A1. 4 weeks later, PBMC was recovered. The CD3epsilongamma heterodimers were prepared with reference to Journal of Molecular Biology (2000) 302: 899-916. From the recovered PBMC, VHH gene was amplified with reference to a method described in J. Immunol. Methods (2007) 324, 13. The amplified VHH gene fragment was connected with CH1-gene 3 gene and inserted into phagemid vectors to prepare a library containing a plurality of VHH-CH1 molecules containing VHH linked to CH1.

### 9-3. Method for Preparing Phage Population Displaying VHH-CH1/Full-Length Light Chain or VHH-CH1/Light Chain Constant Region

[1155] A phagemid vector having an insert of a gene encoding VHH-CH1 is transferred to E. coli by the electroporation method. The obtained E. coli can be cultured and infected by the helper phage M13KO7TC-Vk1-39-k0MTdC prepared in Example 9-1 so that VHH-CH1 expressed from the phagemid vector and the full-length light chain expressed from the helper phage form a Fab structure to prepare a phage population displaying VHH-CH1/full-length light chain (VHH-CH1/Vk1-39-k0MTdC) on the surface of phagemids containing the gene encoding VHH-CH1. Also, the E. coli harboring the phagemid vector having an insert of a gene encoding VHH-CH1 can be cultured and infected by the helper phage M13KO7TC-k0MTdC prepared in Example 9-1 so that VHH-CH1 expressed from the phagemid vector and the light chain constant region expressed from the helper phage form a structure of VHH-CH1 and CL associated to prepare a phage population displaying VHH-CH1/light chain constant region (VHH-CH1/k0MTdC). 2.5 M NaCl/10% PEG can be added to the culture supernatant to purify phages by the PEG precipitation method. The titers of the obtained phages can be confirmed by the general plaque formation method.

9-4. Obtainment of VHH-CH1 Containing Plexin A1 VHH Whose Antigen Binding is Inhibited by Association with Light Chain Variable Region and that Exhibits Antigen Binding Capacity in Absence of Light Chain Variable Region, from VHH-CH1 Phage Library

[1156] VHH-CH1 containing VHH whose antigen binding was inhibited by association with a light chain variable region and that exhibited antigen binding capacity in absence of the light chain variable region was obtained by panning from the VHH-CH1 library prepared in Example 9-2.

[1157] The antigen used was biotin-labeled human plexin A1 prepared in Reference Example.

[1158] The panning method was performed according to the following steps:
[1159] (1) A phage population displaying VHH-CH1/light chain constant region (VHH-CH1/k0MTdC) is produced by the method of Example 9-3 from the VHH-CH1 phage library prepared in Example 9-2, and phages bound with antigen-immobilized magnetic beads are recovered from the population.
[1160] (2) A phage population displaying VHH-CH1/full-length light chain (VHH-CH1/Vk1-39-k0MTdC) is produced by the method of Example 9-3 from the recovered phages, and phages unbound with the antigen-immobilized magnetic beads are recovered from the population.
[1161] (3) The recovered phages are repetitively subjected to the steps (1) and (2) to recover the desired phage.

[1162] As a result of the panning, a plurality of VHH-CH1 molecules were able to be selected whose plexin A1 binding was inhibited by association with the light chain Vk1-39-k0MTdC and that exhibited binding capacity against plexin A1 in the absence of the light chain variable region.

[1163] Another panning method was performed according to the following steps:
[1164] (1) A phage population displaying VHH-CH1/light chain constant region (VHH-CH1/k0MTdC) is produced by the method of Example 9-3 from the VHH-CH1 phage library prepared in Example 9-2, and phages bound with antigen-immobilized magnetic beads are recovered from the population.
[1165] (2) A phage population displaying VHH-CH1/full-length light chain (VHH-CH1/Vk1-39-k0MTdC) is produced by the method of Example 9-3 from the recovered phages, and phages unbound with the antigen-immobilized magnetic beads are recovered from the population. Phages binding to anti-light chain antibody (EY Laboratories, Inc., Cat. BAT-2107-2)-immobilized magnetic beads are further recovered from the recovered phages.
[1166] (3) The recovered phages are repetitively subjected to the steps (1) and (2) to recover the desired phage.

[1167] As a result of the panning, a plurality of VHH-CH1 molecules were able to be selected whose plexin A1 binding was inhibited by association with the light chain Vk1-39-k0MTdC and that exhibited binding capacity against plexin A1 in the absence of the light chain variable region.

[1168] The VHH in the VHH-CH1 thus selected by panning can be used in the preparation of IgG antibody-like molecules.

9-5. Preparation of Protease-Activated IgG Antibody-Like Molecule with Incorporated VHH Binding to Plexin A1

[1169] A nucleotide sequence encoding the VHH contained in each VHH-CH1 molecule selected in Example 9-4 was connected to a nucleotide sequence encoding a protease cleavage site and a heavy chain constant region by the method described in Example 3. The resultant was used as the heavy chain of an IgG antibody-like molecule and combined with a full-length light chain VK1-39-k0MT (SEQ ID NO: 3). IgG antibody-like molecules were expressed by transient expression using FreeStyle 293 cells (Invitrogen Corp.) by a method known to those skilled in the art, and purified by a method known to those skilled in the art using protein A.

[1170] The prepared IgG antibody-like molecules are shown in Table 3.

TABLE 3
IgG antibody-like molecules containing VHH binding to human plexin A1

| | Heavy chain | | Light chain | |
|---|---|---|---|---|
| IgG antibody-like molecule | Name | SEQ ID NO | Name | SEQ ID NO |
| PX02-R2_001-G1mISHI01/ | PX02-R2_001- | 154 | VK1-39-k0MT | 3 |
| VK1-39-k0MT | G1mISHI01 | | | |
| PX02-R4_004-G1mISHI01/ | PX02-R4_004- | 155 | | |
| VK1-39-k0MT | G1mISHI01 | | | |
| PX02-R4_017-G1mISHI01/ | PX02-R4_017- | 156 | | |
| VK1-39-k0MT | G1mISHI01 | | | |
| PX03-R2_006-G1mISHI01/ | PX03-R2_006- | 157 | | |
| VK1-39-k0MT | G1mISHI01 | | | |
| PX03-R4_009-G1mISHI01/ | PX03-R4_009- | 158 | | |
| VK1-39-k0MT | G1mISHI01 | | | |

### 9-6 Activation of Protease-Activated IgG Antibody-Like Molecule by Protease Cleavage

[1171] The IgG antibody-like molecules prepared in Example 9-4 were cleaved by protease in the same way as in Example 3, and the degree of the cleavage was evaluated by reducing SDS-PAGE. The results are shown in FIG. 22. The protease concentration was set to 25 nM.

[1172] As a result, the prepared IgG antibody-like molecules were each confirmed to undergo protease cleavage at the protease cleavage sequence.

[1173] Next, the human plexin A1 binding evaluation of VHH released by protease treatment was conducted in the same way as in Example 3. Octet sensorgrams are shown in FIG. 23.

[1174] As a result, each of the prepared IgG antibody-like molecule did not exhibit antigen binding before the protease treatment, whereas the antigen binding of the released VHH was confirmed after the protease treatment.

### Example 10: Polypeptide Containing Bispecific VHH-VHH

### 10-1. Bispecific VHH-VHH Binding to Cancer Antigen and CD3, and Preparation of Polypeptide Containing the Bispecific VHH-VHH

[1175] As shown in FIG. 8, a protease-activated antigen binding domain may form a bispecific antigen binding molecule with a second antigen binding domain.

[1176] VHH HN3 (SEQ ID NO: 159) recognizing human glypican 3 and VHH G03 (SEQ ID NO: 160) recognizing CD3 were connected via a linker constituted by glycine and serine to prepare bispecific VHH-VHH HN3G03. An antibody heavy chain constant region shown in SEQ ID NO: 161 was further connected thereto via a protease cleavage sequence, and the resulting heavy chain HN3G03-cF760mnHIF (SEQ ID NO: 162) containing the bispecific VHH-VHH was inserted into a vector for expression in animals.

[1177] VHH HerF07 (SEQ ID NO: 163) recognizing Her2 and VHH G03 (SEQ ID NO: 160) recognizing CD3 were connected via a linker constituted by glycine and serine to prepare bispecific VHH-VHH HerF07G03. An antibody heavy chain constant region shown in SEQ ID NO: 161 was further connected thereto via a protease cleavage sequence, and the resulting heavy chain HerF07G03-cF760mnHIF (SEQ ID NO: 164) containing the bispecific VHH-VHH was inserted into a vector for expression in animals.

[1178] Expi293 cells (Life Technologies Corp.) were cotransfected with each heavy chain containing the bispecific VHH-VHH and vectors for expression in animals respectively having inserts of a light chain VK1.39-k0MT (SEQ ID NO: 3) and a human constant region sequence VHn-Kn010dGK (SEQ ID NO: 166) from the hinge region to the C terminus, to express a polypeptide containing the bispecific VHH-VHH. Then, the polypeptide containing the bispecific VHH-VHH was purified by a method known to those skilled in the art using a MonoSpin ProA 96-well plate type (GL Sciences Inc., Cat No.: 7510-11312). The polypeptide containing the bispecific VHH-VHH HN3G03 is HN3G03-cF760mnHIF/VHn-Kn010dGK/VK1.39-k0MT, and the polypeptide containing the bispecific VHH-VHH HerF07G03 is HerF07G03-cF760mnHIF/VHn-Kn010dGK/VK1.39-k0MT.

[1179] For protease treatment, uPA (Recombinant Human u-Plasminogen Activator, R&D Systems, Inc.) (final concentration: 25 nM) was added to 40 micro g of each purified polypeptide containing the bispecific VHH-VHH and incubated at 37 degrees C. for 20 hours or longer. Protease-untreated samples were incubated after addition of PBS instead of protease in the same amount as in the protease. Whether the protease-cleaved polypeptide containing the bispecific VHH-VHH underwent the cleavage as intended was confirmed by reducing SDS-PAGE. The results are shown in FIG. 24. As shown in FIG. 24, it was suggested that the bispecific VHH-VHH was separated from the whole molecule by the protease cleavage.

### 10-2. CD3 Activation Evaluation of Polypeptide Containing Bispecific VHH-VHH Against GPC3 and CD3 by Protease Cleavage

[1180] Agonist activity against CD3 was evaluated using Jurkat-NFAT reporter cells (NFAT luc2_jurkat cell). The Jurkat-NFAT reporter cells are a cell line of CD3-expressing human acute T-cell leukemia-derived cells fused with a NFAT response element and luciferase (luc2P) and express luciferase by the activation of a signal downstream of CD3. The target cells used for antibodies based on GPC3 were a SK-pca60 cell line established by forcing a human liver cancer-derived cell line SK-HEP-1 to express human GPC3. The target cells and the effector cells were added at 1.25E+04 cells/well and 7.50E+04 cells/well, respectively, to each well of White-bottomed, 96-well assay plate (Costar, 3917). HN3G03-cF760mnHIF/VHn-Kn010dGK/VK1.39-k0MT with or without protease treatment was added at a final concentration of 1, 10, or 100 nM to the well. After 24-hour incubation at 37 degrees C. in the presence of 5% CO₂, the luciferase enzyme activity was measured as luminescence intensity using Bio-Glo luciferase assay system (Promega Corp., G7940) according to the attached protocol. 2104 EnVision was used in detection. The results are shown in FIG. 25. No elevation in luciferase activity was seen in the sample without protease treatment, whereas elevation in luciferase activity was shown in HN3G03-cF760mnHIF/VHn-Kn010dGK/VK1.39-k0MT treated with protease. Specifically, HN3G03-cF760mnHIF/VHn-Kn010dGK/VK1.39-k0MT treated with protease was able to be confirmed to have agonist activity against CD3, while the bispecific VHH-VHH against GPC3 and CD3 was released from HN3G03-cF760mnHIF/VHn-Kn010dGK/VK1.39-k0MT by the protease cleavage and exerted the CD3 binding activity inhibited without cleavage.

### 10-3. CD3 Activation Evaluation of Polypeptide Containing Bispecific VHH-VHH Against Her2 and CD3 by Protease Cleavage

[1181] Agonist activity against CD3 was evaluated using Jurkat-NFAT reporter cells (NFAT luc2_jurkat cell). The Jurkat-NFAT reporter cells (effector cells) are a cell line of CD3-expressing human acute T-cell leukemia-derived cells fused with a NFAT response element and luciferase (luc2P) and express luciferase by the activation of a signal downstream of CD3. The target cells used were a LS1034 cell line. The target cells and the effector cells were added at 2.50E+04 cells/well and 7.50E+04 cells/well, respectively, to each well of White-bottomed, 96-well assay plate (Costar, 3917). HerF07G03-cF760mnHIF/VHn-Kn010dGK/VK1.39-k0MT with or without protease treatment was added at a final concentration of 0.01, 0.1, and 1 nM to the well. After 24-hour incubation at 37 degrees C. in the presence of 5% CO₂, the luciferase enzyme activity was measured as luminescence intensity using Bio-Glo luciferase assay system (Promega Corp., G7940) according to the attached protocol. 2104 EnVision was used in detection. The results are shown in FIG. 26. No elevation in luciferase activity was seen in the sample without protease treatment, whereas elevation in luciferase activity was shown in HerF07G03-cF760mnHIF/VHn-Kn010dGK/VK1.39-k0MT treated with protease. Specifically, HerF07G03-cF760mnHIF/VHn-Kn010dGK/VK1.39-k0MT treated with protease was able to be confirmed to have agonist activity against CD3, while the bispecific VHH-VHH against Her2 and CD3 was released from HerF07G03-cF760mnHIF/VHn-Kn010dGK/VK1.39-k0MT by the protease cleavage and exerted the CD3 binding activity inhibited without cleavage.

### Example 11: Introduction of Protease Cleavage Site to Polypeptide with Incorporated VHH

[1182] 11-1. Introduction of Protease Cleavage Sequence to Polypeptide with Incorporated VHH Binding to IL6R

[1183] An expression vector encoding IL6R90-G1T4 (SEQ ID NO: 167) containing IL6R90 (SEQ ID NO: 1), VHH having binding and neutralizing activities against human IL6R as described in International Publication No. WO2010/115998, fused with a human IgG1 constant region (CH1-hinge-CH2-CH3) was prepared by a method known to those skilled in the art. An IgG antibody-like molecule IL6R90-G1T4/VK1-39-k0MT (heavy chain: SEQ ID NO: 167, light chain: SEQ ID NO: 3) was expressed by transient expression using FreeStyle 293 cells (Invitrogen Corp.) or Expi293 cells (Life Technologies Corp.) by a method known to those skilled in the art, and purified by a method known to those skilled in the art using protein A.

[1184] A protease cleavage sequence shown in SEQ ID NO: 178 was inserted near the boundary between VHH and CH1 in the heavy chain of IL6R90-G1T4/VK1-39-k0MT to prepare a VHH-containing heavy chain IL6R90.12aa-G1T4 (SEQ ID NO: 189) harboring the protease cleavage sequence. An IL6R90.12aa-G1T4 expression vector was prepared by a method known to those skilled in the art.

[1185] IL6R90.12aa-G1T4 was combined with a light chain shown in SEQ ID NO: 3. An IgG1 antibody-like molecule IL6R90.12aa-G1T4/VK1-39-k0MT harboring the protease cleavage sequence near the boundary between VHH and CH1 was expressed by transient expression using FreeStyle 293 cells (Invitrogen Corp.) or Expi293 cells (Life Technologies Corp.) by a method known to those skilled in the art, and purified by a method known to those skilled in the art using protein A.

### 11-2. Protease Cleavage Evaluation of IgG Antibody-Like Molecule Containing Anti-Human IL6R VHH and Harboring Protease Cleavage Sequence in its Heavy Chain Region

[1186] Whether the IgG antibody-like molecule prepared in Example 11-1 would be cleaved by protease was verified. Recombinant Human Matriptase/ST14 Catalytic Domain (MT-SP1) (R&D Systems, Inc., 3946-SE-010) was used as the protease. 10 nM protease and 50 micro g/mL of the antibody were reacted in PBS under a condition of 37 degrees C. for 20 hours. Then, cleavage by the protease was evaluated by reducing SDS-PAGE. The results are shown in FIG. 27. As a result, the protease treatment of the IgG antibody-like molecule IL6R90.12aa generated a new band around 37 kDa. Thus, the IgG antibody-like molecule was confirmed to undergo protease cleavage at the protease cleavage sequence (SEQ ID NO: 178) inserted near the boundary between VHH and CH1. Also, a protease cleavage sequence represented by SEQ ID NO: 178 was also confirmed to be cleaved by human uPA and mouse uPA when incorporated in an IgG antibody by a similar method.

### Example 12: Evaluation of Degree of Activation by Protease Cleavage of IgG Antibody-Like Molecule Harboring Protease Cleavage Sequence in its Light Chain

[1187] An expression vector encoding IL6R75-G1m (SEQ ID NO: 191) containing IL6R75 (SEQ ID NO: 190), VHH having binding and neutralizing activities against human IL6R as described in International Publication No. WO2010/115998, fused with a human IgG1 constant region (CH1-hinge-CH2-CH3) was prepared by a method known to those skilled in the art. IL6R75hu-G1m (SEQ ID NO: 192) was prepared by introducing amino acid alterations to the interface site between VHH and VL in the same way as in Example 4-2. IgG antibody-like molecules IL6R90-G1m/VK1-39P+4-Pk0MT (heavy chain: SEQ ID NO: 2, light chain: SEQ ID NO: 72), 20A11hu-G1m/K1-39P+4-Pk0MT (heavy chain: SEQ ID NO: 39, light chain: SEQ ID NO: 72), and IL6R75hu-G1m/VK1-39P+4-Pk0MT (heavy chain: SEQ ID NO: 192, light chain: SEQ ID NO: 72) were expressed and purified in the same way as in Example 3 using the protease cleavage sequence-incorporated light chain VK1-39P+4-Pk0MT (SEQ ID NO: 72) and IL6R90-G1m (SEQ ID NO: 2), 20A11hu-G1m (SEQ ID NO: 39), and IL6R75hu-G1m (SEQ ID NO: 192) as heavy chains.

[1188] IL6R90-G1m/VK1-39P+4-Pk0MT, 20A11hu-G1m/VK1-39P+4-Pk0MT, and IL6R75hu-G1m/VK1-39P+4-Pk0MT were cleaved by protease in the same way as in Example 3, and the degree of the cleavage was evaluated. The results are shown in FIG. 28. Specifically, recombinant Human Matriptase/ST14 Catalytic Domain (R&D Systems, Inc., 3946-SE-010) was used as the protease. 50 nM protease and 50 micro g/mL of each IgG antibody-like molecule were reacted in PBS under a condition of 37 degrees C. for 20 hours. Then, cleavage by the protease was evaluated by reducing SDS-PAGE. As a result, IL6R90-G1m/VK1-39P+4-Pk0MT, 20A11hu-G1m/VK1-39P+4-Pk0MT, and IL6R75hu-G1m/VK1-39P+4-Pk0MT were confirmed to undergo protease cleavage near the boundary between VL and CL.

[1189] Next, the IL6R binding of VHH exposed by protease treatment was evaluated by ELISA. Specifically, the hsIL-6R-BAP1 used in Example 3 was immobilized onto a streptavidin-coated 384-well plate (Greiner Bio-One GmbH, 781990), and each cleaved IgG antibody-like molecule was bound thereto at room temperature. After reaction for 30 minutes, a HRP-labeled anti-human IgG antibody (Sigma-Aldrich Co. LLC, SAB3701362-2MG) was allowed to act thereon at room temperature for 10 minutes, and TMB Chromogen Solution (Life Technologies Corp., 002023) was reacted therewith. After reaction at room temperature for 30 minutes, the reaction was terminated with sulfuric acid, followed by the measurement of absorbance at 450 nm using Synergy HTX multi-mode reader (BioTek Instruments, Inc.). The absorbance ratio of the antigen-immobilized wells to unimmobilized wells was calculated and used as a S/N ratio. The S/N ratio (mean) of ELISA was plotted on the ordinate against the concentration of each IgG antibody-like molecule on the abscissa. The results are shown in FIG. 29. These results showed that the protease-treated IgG antibody-like molecule 20A11hu-G1m/VK1-39P+4-Pk0MT harboring the cleavage sequence in its light chain had 10 or more times the IL6R binding activity of the protease-untreated IgG antibody-like molecule, and the protease-treated IgG antibody-like molecule IL6R90-G1m/VK1-39P+4-Pk0MT had 1000 or more times the IL6R binding activity of the protease-untreated one.

### Example 13: Preparation and Evaluation of IgG Antibody-Like Molecules Harboring Diverse Protease Cleavage Sequences

### 13-1. Preparation of Polypeptides Harboring Diverse Protease Cleavage Sequences

[1190] IgG antibody-like molecules were prepared in the same way as in Example 3 using recognition sequences for proteases other than urokinase or matriptase. Various peptide sequences known to be cleaved by MMP-2, MMP-7, MMP-9, or MMP-13 were each inserted near the boundary between the variable and constant regions of IL6R90-G1m, and a peptide sequence containing a flexible linker consisting of a glycine-serine polymer was inserted in the vicinity of these cleavage sequences. The inserted sequences are shown in Table 4.

TABLE 4
Various inserted sequences

| Protease | Inserted sequence | SEQ ID NO |
|---|---|---|
| MMP-2 | PLGLAG | 34 |
| MMP-9 | | |
| MMP-2 | GAGIPVSLRSGAG | 70 |
| MMP-2 | GPLGIAGQ | 71 |
| MMP-2 | GGPLGMLSQS | 72 |
| MMP-2 | PLGLWA | 73 |
| MMP-7 | VPLSLTMG | 35 |
| MMP-7 | GAGVPLSLTMGAG | 75 |
| MMP-9 | GAGVPLSLYSGAG | 76 |
| MMP-13 | GAGPQGLAGQRGIVAG | 91 |
| MMP-2 | GGGGSPLGLAGGGGGS | 193 |
| MMP-9 | | |
| MMP-2 | GGGGSGPLGIAGQGGGGS | 194 |
| MMP-9 | GGGGSGAGVPLSLYSGAGGGGGS | 195 |

[1191] Heavy chains were designed such that these sequences were inserted near the boundary between the variable and constant regions of IL6R90-G1m. Expression vectors encoding the heavy chain variants 6R90EIVHEMP2.1-6R90EICHEMP2.1G1m (SEQ ID NO: 165), 6R90EIVHEMP2.2-6R90EICHEMP2.2G1m (SEQ ID NO: 202), 6R90EIVHEMP2.3-6R90EICHEMP2.3G1m (SEQ ID NO: 203), 6R90EIVHEMP2.4-6R90EICHEMP2.4G1m (SEQ ID NO: 204), 6R90EIVHEMP7.1-6R90EICHEMP7.1G1m (SEQ ID NO: 205), 6R90EIVHEMP7.2-6R90EICHEMP7.2G1m (SEQ ID NO: 206), 6R90EIVHEMP13-6R90EICHEMP13G1m (SEQ ID NO: 207), 6R90EIVHEG4SMP2MP9G4S-6R90EICHEG4SMP2MP9G4SG1m (SEQ ID NO: 196), 6R90EIVHEG4SMP2.2G4S-6R90EIVHEG4SMP2.2G4SG1m (SEQ ID NO: 197), and 6R90EIVHEG4SMP9G4S-6R90EIVHEG4SMP9G4SG1m (SEQ ID NO: 198) were prepared by a method known to those skilled in the art.

[1192] Table 5 shows the IgG antibody-like molecules combining these heavy chain variants with a light chain and harboring the protease cleavage sequence near the boundary between the variable and constant regions of the heavy chain. These IgG antibody-like molecules were expressed by transient expression using FreeStyle 293 cells (Invitrogen Corp.) or Expi293 cells (Life Technologies Corp.) by a method known to those skilled in the art, and purified by a method known to those skilled in the art using protein A.

TABLE 5
IgG antibody-like molecules

| | | SEQ ID NO of | SEQ ID NO of |
|---|---|---|---|
| Protease | IgG antibody-like molecule | heavy chain | light chain |
| MMP-2 | 6R90EIVHEMP2.1-6R90EICHEMP2.1G1m/ | 165 | 3 |
| | VK1-39-k0MT | | |
| MMP-2 | 6R90EIVHEMP2.2-6R90EICHEMP2.2G1m/ | 202 | 3 |
| | VK1-39-k0MT, | | |
| MMP-2 | 6R90EIVHEMP2.3-6R90EICHEMP2.3G1m/ | 203 | 3 |
| | VK1-39-k0MT, | | |
| MMP-2 | 6R90EIVHEMP2.4-6R90EICHEMP2.4G1m/ | 204 | 3 |
| | VK1-39-k0MT, | | |
| MMP-7 | 6R90EIVHEMP7.1-6R90EICHEMP7.1G1m/ | 205 | 3 |
| | VK1-39-k0MT, | | |
| MMP-7 | 6R90EIVHEMP7.2-6R90EICHEMP7.2G1m/ | 206 | 3 |
| | VK1-39-k0MT | | |
| MMP-13 | 6R90EIVHEMP13-6R90EICHEMP13G1m/ | 207 | 3 |
| | VK1-39-k0MT | | |
| MMP-2 | 6R90EIVHEG4SMP2MP9G4S-6R90E1CHEG4SMP2MP9G4SG1m/ | 196 | 3 |
| MMP-9 | VK1-39-k0MT | | |
| MMP-2 | 6R90EIVHEG4SMP2.2G4S-6R90EICHEG4SMP2.2G4SG1m/ | 197 | 3 |
| | VK1-39-k0MT | | |
| MMP-9 | 6R90EIVHEG4SMP9G4S-6R90EICHEG4SMP9G4SG1m/ | 198 | 3 |
| | VK1-39-k0MT | | |

### 13-2. Protease Cleavage Evaluation of IgG Antibody-Like Molecules Harboring Diverse Protease Cleavage Sequences

[1193] Whether the IgG antibody-like molecules prepared in Example 13-1 would be cleaved by protease was verified. Recombinant human MMP-2 (R&D Systems, Inc., 902-MP-010), recombinant human MMP-7 (R&D Systems, Inc., 907-MP-010), recombinant human MMP-9 (R&D Systems, Inc., 911-MP-010), or recombinant human MMP-13 (R&D Systems, Inc., 511-MM-010) was used as the protease. MMP-2, MMP-7, MMP-9, and MMP-13 were used after being each mixed with 1 MMP-aminophenylmercuric acetate (APMA; Abcam PLC, ab112146) and activated at 37 degrees C. for 1 or 24 hours. 50 nM, 100 nM, or 500 nM protease and 50 micro g/mL or 100 micro g/mL of each IgG-antibody like molecule were reacted in PBS or 20 mM Tris-HCl, 150 mM NaCl, and 5 mM CaCl₂) (pH 7.2) (hereinafter, referred to as Tris) under a condition of 37 degrees C. for 20 hours. Then, cleavage by the protease was evaluated by reducing SDS-PAGE. The results are shown in FIGS. 30A and 30B. In FIG. 30B, the protease cleavage was carried out using an assay buffer (MMP Activity Assay Kit (Fluorometric—Green) (ab112146), Component C: Assay Buffer).

[1194] As a result, 6R90EIVHEMP2.1-6R90EICHEMP2.1G1m/VK1-39-k0MT, 6R90EIVHEMP2.2-6R90EICHEMP2.2G1m/VK1-39-k0MT, 6R90EIVHEMP2.3-6R90EICHEMP2.3G1m/VK1-39-k0MT, 6R90EIVHEMP2.4-6R90EICHEMP2.4G1m/VK1-39-k0MT, 6R90EIVHEG4SMP2MP9G4S-6R90EICHEG4SMP2MP9G4SG1m/VK1-39-k0MT, and 6R90EIVHEG4SMP2.2G4S-6R90EICHEG4SMP2.2G4SG1m/VK1-39-k0MT were confirmed to be cleaved by MMP-2. 6R90EIVHEMP7.1-6R90EICHEMP7.1G1m/VK1-39-k0MT and 6R90EIVHEMP7.2-6R90EICHEMP7.2G1m/VK1-39-k0MT were confirmed to be cleaved by MMP-7. 6R90EIVHEG4SMP2MP9G4S-6R90EICHEG4SMP2MP9G4SG1m/VK1-39-k0MT and 6R90EIVHEG4SMP9G4S-6R90EICHEG4SMP9G4SG1m/VK1-39-k0MT were confirmed to be cleaved by MMP-9. 6R90EIVHEMP13-6R90EICHEMP13G1m/VK1-39-k0MT was confirmed to be cleaved by MMP-13.

### Example 14: Evaluation of Antibodies Harboring Protease Cleavage Sequence at Diverse Positions of Heavy Chain

### 14-1. Preparation of Antibodies Harboring Protease Cleavage Sequence at Diverse Positions of Heavy Chain

[1195] Peptide sequence B (SEQ ID NO: 210) reportedly cleavable by urokinase (uPA) and matriptase (MT-SP1) was inserted at each of different positions within a MRA heavy chain variable region (MRAH; SEQ ID NO: 211) to prepare engineered MRA heavy chain variable regions shown in Table 6. These engineered MRA heavy chain variable regions were each linked to a MRA heavy chain constant region (G1T4; SEQ ID NO: 212) to prepare engineered MRA heavy chains. The corresponding gene expression vectors were prepared by a method known to those skilled in the art. Also, peptide sequence B (SEQ ID NO: 210) was inserted at each of different positions within a MRA heavy chain constant region (G1T4; SEQ ID NO: 212) to prepare engineered MRA heavy chain constant regions shown in Table 7. These engineered MRA heavy chain constant regions were each linked to a MRA heavy chain variable region (MRAH; SEQ ID NO: 211) to prepare engineered MRA heavy chains. The corresponding gene expression vectors were prepared by a method known to those skilled in the art. Tables 6 and 7 also show the protease cleavage sequence insertion positions in the prepared engineered MRA heavy chain variable regions and engineered MRA heavy chain constant regions. In Table 6, the inserted sequence was located adjacent on the constant region side to the described position (Kabat numbering) in the antibody heavy chain variable region. In Table 7, the inserted sequence was located adjacent on the variable region side to the described position (EU numbering) in the antibody heavy chain constant region.

TABLE 6
Engineered MRA heavy chain variable regions and
protease cleavage sequence insertion positions

| | Protease cleavage sequence | |
|---|---|---|
| Engineered MRA heavy | insertion position | SEQ |
| chain variable region | (Kabat numbering) | ID NO |
| MRAVH007.12aa | 7 | 213 |
| MRAVH008.12aa | 8 | 214 |
| MRAVH009.12aa | 9 | 215 |
| MRAVH010.12aa | 10 | 216 |
| MRAVH011.12aa | 11 | 217 |
| MRAVH012.12aa | 12 | 218 |
| MRAVH013.12aa | 13 | 219 |
| MRAVH014.12aa | 14 | 220 |
| MRAVH015.12aa | 15 | 221 |
| MRAVH041.12aa | 40 | 222 |
| MRAVH042.12aa | 41 | 223 |
| MRAVH043.12aa | 42 | 224 |
| MRAVH044.12aa | 43 | 225 |
| MRAVH045.12aa | 44 | 226 |
| MRAVH046.12aa | 45 | 227 |
| MRAVH056.12aa | 55 | 228 |
| MRAVH057.12aa | 56 | 229 |
| MRAVH058.12aa | 57 | 230 |
| MRAVH059.12aa | 58 | 231 |
| MRAVH060.12aa | 59 | 232 |
| MRAVH061.12aa | 60 | 233 |
| MRAVH062.12aa | 61 | 234 |
| MRAVH063.12aa | 62 | 235 |
| MRAVH064.12aa | 63 | 236 |
| MRAVH065.12aa | 64 | 237 |
| MRAVH066.12aa | 65 | 238 |
| MRAVH067.12aa | 66 | 239 |
| MRAVH068.12aa | 67 | 240 |
| MRAVH069.12aa | 68 | 241 |
| MRAVH074.12aa | 73 | 242 |
| MRAVH075.12aa | 74 | 243 |
| MRAVH076.12aa | 75 | 244 |
| MRAVH077.12aa | 76 | 245 |
| MRAVH078.12aa | 77 | 246 |
| MRAVH087.12aa | 83 | 247 |
| MRAVH088.12aa | 84 | 248 |
| MRAVH089.12aa | 85 | 249 |
| MRAVH099.12aa | 95 | 250 |
| MRAVH100.12aa | 96 | 251 |
| MRAVH101.12aa | 97 | 252 |
| MRAVH102.12aa | 98 | 253 |
| MRAVH109.12aa | 103 | 254 |
| MRAVH110.12aa | 104 | 255 |
| MRAVH111.12aa | 105 | 256 |
| MRAVH112.12aa | 106 | 257 |
| MRAVH113.12aa | 107 | 258 |
| MRAVH114.12aa | 108 | 259 |
| MRAVH115.12aa | 109 | 260 |
| MRAVH116.12aa | 110 | 261 |
| MRAVH117.12aa | 111 | 262 |
| MRAVH118.12aa | 112 | 263 |
| MRAVH119.12aa | 113 | 264 |

TABLE 7
Engineered MRA heavy chain constant regions and
protease cleavage sequence insertion positions

| | Protease cleavage sequence | |
|---|---|---|
| Engineered MRA heavy | insertion position | SEQ |
| chain constant region | (EU numbering) | ID NO |
| G1T4.118.12aa | 119 | 265 |
| G1T4.119.12aa | 120 | 266 |
| G1T4.120.12aa | 121 | 267 |
| G1T4.121.12aa | 122 | 268 |
| G1T4.122.12aa | 123 | 269 |
| G1T4.123.12aa | 124 | 270 |
| G1T4.124.12aa | 125 | 271 |
| G1T4.129.12aa | 130 | 272 |
| G1T4.130.12aa | 131 | 273 |
| G1T4.131.12aa | 132 | 274 |
| G1T4.132.12aa | 133 | 275 |
| G1T4.134.12aa | 135 | 276 |
| G1T4.135.12aa | 136 | 277 |
| G1T4.137.12aa | 138 | 278 |
| G1T4.139.12aa | 140 | 279 |

[1196] Engineered MRA antibodies shown in Table 8 were expressed by transient expression using the engineered MRA heavy chains thus prepared in combination with the MRA light chain and using FreeStyle 293 cells (Invitrogen Corp.) or Expi293 cells (Life Technologies Corp.) by a method known to those skilled in the art, and purified by a method known to those skilled in the art using protein A.

TABLE 8
Engineered MRA antibodies

| | SEQ ID NO of | SEQ ID NO of |
|---|---|---|
| Antibody name | heavy chain | light chain |
| MRAVH007.12aa-G1T4/MRAL-k0 | 347 | 209 |
| MRAVH008.12aa-G1T4/MRAL-k0 | 348 | 209 |
| MRAVH009.12aa-G1T4/MRAL-k0 | 349 | 209 |
| MRAVH010.12aa-G1T4/MRAL-k0 | 350 | 209 |
| MRAVH011.12aa-G1T4/MRAL-k0 | 351 | 209 |
| MRAVH012.12aa-G1T4/MRAL-k0 | 352 | 209 |
| MRAVH013.12aa-G1T4/MRAL-k0 | 353 | 209 |
| MRAVH014.12aa-G1T4/MRAL-k0 | 354 | 209 |
| MRAVH015.12aa-G1T4/MRAL-k0 | 355 | 209 |
| MRAVH041.12aa-G1T4/MRAL-k0 | 356 | 209 |
| MRAVH042.12aa-G1T4/MRAL-k0 | 357 | 209 |
| MRAVH043.12aa-G1T4/MRAL-k0 | 358 | 209 |
| MRAVH044.12aa-G1T4/MRAL-k0 | 359 | 209 |
| MRAVH045.12aa-G1T4/MRAL-k0 | 360 | 209 |
| MRAVH046.12aa-G1T4/MRAL-k0 | 361 | 209 |
| MRAVH056.12aa-G1T4/MRAL-k0 | 362 | 209 |
| MRAVH057.12aa-G1T4/MRAL-k0 | 363 | 209 |
| MRAVH058.12aa-G1T4/MRAL-k0 | 364 | 209 |
| MRAVH059.12aa-G1T4/MRAL-k0 | 365 | 209 |
| MRAVH060.12aa-G1T4/MRAL-k0 | 366 | 209 |
| MRAVH061.12aa-G1T4/MRAL-k0 | 367 | 209 |
| MRAVH062.12aa-G1T4/MRAL-k0 | 368 | 209 |
| MRAVH063.12aa-G1T4/MRAL-k0 | 369 | 209 |
| MRAVH064.12aa-G1T4/MRAL-k0 | 370 | 209 |
| MRAVH065.12aa-G1T4/MRAL-k0 | 371 | 209 |
| MRAVH066.12aa-G1T4/MRAL-k0 | 372 | 209 |
| MRAVH067.12aa-G1T4/MRAL-k0 | 373 | 209 |
| MRAVH068.12aa-G1T4/MRAL-k0 | 374 | 209 |
| MRAVH069.12aa-G1T4/MRAL-k0 | 375 | 209 |
| MRAVH074.12aa-G1T4/MRAL-k0 | 376 | 209 |
| MRAVH075.12aa-G1T4/MRAL-k0 | 377 | 209 |
| MRAVH076.12aa-G1T4/MRAL-k0 | 378 | 209 |
| MRAVH077.12aa-G1T4/MRAL-k0 | 379 | 209 |
| MRAVH078.12aa-G1T4/MRAL-k0 | 380 | 209 |
| MRAVH087.12aa-G1T4/MRAL-k0 | 381 | 209 |
| MRAVH088.12aa-G1T4/MRAL-k0 | 382 | 209 |
| MRAVH089.12aa-G1T4/MRAL-k0 | 383 | 209 |
| MRAVH099.12aa-G1T4/MRAL-k0 | 384 | 209 |
| MRAVH100.12aa-G1T4/MRAL-k0 | 385 | 209 |
| MRAVH101.12aa-G1T4/MRAL-k0 | 386 | 209 |
| MRAVH102.12aa-G1T4/MRAL-k0 | 387 | 209 |
| MRAVH109.12aa-G1T4/MRAL-k0 | 388 | 209 |
| MRAVH110.12aa-G1T4/MRAL-k0 | 389 | 209 |
| MRAVH111.12aa-G1T4/MRAL-k0 | 390 | 209 |
| MRAVH112.12aa-G1T4/MRAL-k0 | 391 | 209 |
| MRAVH113.12aa-G1T4/MRAL-k0 | 392 | 209 |
| MRAVH114.12aa-G1T4/MRAL-k0 | 393 | 209 |
| MRAVH115.12aa-G1T4/MRAL-k0 | 394 | 209 |
| MRAVH116.12aa-G1T4/MRAL-k0 | 395 | 209 |
| MRAVH117.12aa-G1T4/MRAL-k0 | 396 | 209 |
| MRAVH118.12aa-G1T4/MRAL-k0 | 397 | 209 |
| MRAVH119.12aa-G1T4/MRAL-k0 | 398 | 209 |
| MRAH-G1T4.118.12aa/MRAL-k0 | 399 | 209 |
| MRAH-G1T4.119.12aa/MRAL-k0 | 400 | 209 |
| MRAH-G1T4.120.12aa/MRAL-k0 | 401 | 209 |
| MRAH-G1T4.121.12aa/MRAL-k0 | 402 | 209 |
| MRAH-G1T4.122.12aa/MRAL-k0 | 403 | 209 |
| MRAH-G1T4.123.12aa/MRAL-k0 | 404 | 209 |
| MRAH-G1T4.124.12aa/MRAL-k0 | 405 | 209 |
| MRAH-G1T4.129.12aa/MRAL-k0 | 406 | 209 |
| MRAH-G1T4.130.12aa/MRAL-k0 | 407 | 209 |
| MRAH-G1T4.131.12aa/MRAL-k0 | 408 | 209 |
| MRAH-G1T4.132.12aa/MRAL-k0 | 409 | 209 |
| MRAH-G1T4.134.12aa/MRAL-k0 | 410 | 209 |
| MRAH-G1T4.135.12aa/MRAL-k0 | 411 | 209 |
| MRAH-G1T4.137.12aa/MRAL-k0 | 412 | 209 |
| MRAH-G1T4.139.12aa/MRAL-k0 | 413 | 209 |

### 14-2. Protease Cleavage Evaluation of Anti-Human IL6R Neutralizing Antibody Harboring Protease Cleavage Sequence in its Antibody Heavy Chain

[1197] Whether the engineered MRA antibodies prepared in Example 14-1 would be cleaved by protease was verified. Recombinant Human Matriptase/ST14 Catalytic Domain (human MT-SP1, hMT-SP1) (R&D Systems, Inc., 3946-SE-010) was used as the protease. 10 nM protease and 50 micro g/mL of each antibody were reacted in PBS under a condition of 37 degrees C. for 20 hours, followed by reducing SDS-PAGE. The results are shown in FIGS. 31A, 31B, 31C, 31D, 31E, 31F, 31G, 31H, 31I, 32A, 32B, and 32C. The protease-treated engineered MRA antibodies underwent cleavage at their heavy chains and generated a heavy chain band at a position with a smaller molecular weight than that of the heavy chains of protease-untreated engineered MRA antibodies (in the drawings, a band appearing around 50 kDa in the MT-SP1(−) lane). From this result, the engineered MRA antibodies prepared in Example 14-1 were confirmed to be cleaved by hMT-SP1.

### Example 15: Evaluation of Antibodies Harboring Protease Cleavage Sequence at Diverse Positions of Light Chain

### 15-1. Preparation of Antibodies Harboring Protease Cleavage Sequence at Diverse Positions of Light Chain

[1198] Peptide sequence B (SEQ ID NO: 210) reportedly cleavable by urokinase (uPA) and matriptase (MT-SP1) was inserted at each of different positions within a MRA light chain variable region (MRAL; SEQ ID NO: 280) to prepare engineered MRA light chain variable regions shown in Table 9. These engineered MRA light chain variable regions were each linked to a MRA light chain constant region (k0; SEQ ID NO: 281) to prepare engineered MRA light chains. The corresponding gene expression vectors were prepared by a method known to those skilled in the art. Also, peptide sequence B (SEQ ID NO: 210) was inserted at each of different positions within a MRA light chain constant region (k0; SEQ ID NO: 281) to prepare engineered MRA light chain constant regions shown in Table 10. These engineered MRA light chain constant regions were each linked to a MRA light chain variable region (MRAL; SEQ ID NO: 280) to prepare engineered MRA light chains. The corresponding gene expression vectors were prepared by a method known to those skilled in the art. Tables 9 and 10 also show the protease cleavage sequence insertion positions in the prepared engineered MRA light chain variable regions and engineered MRA light chain constant regions. In Table 9, the inserted sequence was located adjacent on the constant region side to the described amino acid position (Kabat numbering) in the antibody light chain variable region. In Table 10, the inserted sequence was located adjacent on the variable region side to the described amino acid position (EU numbering) in the antibody light chain constant region.

TABLE 9
Engineered MRA light chain variable regions and
protease cleavage sequence insertion positions

| | Protease cleavage sequence | |
|---|---|---|
| Engineered MRA light | insertion position | SEQ |
| chain variable region | (Kabat numbering) | ID NO |
| MRAVL007.12aa | 7 | 282 |
| MRAVL008.12aa | 8 | 283 |
| MRAVL009.12aa | 9 | 284 |
| MRAVL010.12aa | 10 | 285 |
| MRAVL011.12aa | 11 | 286 |
| MRAVL012.12aa | 12 | 287 |
| MRAVL013.12aa | 13 | 288 |
| MRAVL014.12aa | 14 | 289 |
| MRAVL015.12aa | 15 | 290 |
| MRAVL016.12aa | 16 | 291 |
| MRAVL017.12aa | 17 | 292 |
| MRAVL018.12aa | 18 | 293 |
| MRAVL039.12aa | 39 | 294 |
| MRAVL040.12aa | 40 | 295 |
| MRAVL041.12aa | 41 | 296 |
| MRAVL042.12aa | 42 | 297 |
| MRAVL043.12aa | 43 | 298 |
| MRAVL044.12aa | 44 | 299 |
| MRAVL045.12aa | 45 | 300 |
| MRAVL049.12aa | 49 | 301 |
| MRAVL050.12aa | 50 | 302 |
| MRAVL051.12aa | 51 | 303 |
| MRAVL052.12aa | 52 | 304 |
| MRAVL053.12aa | 53 | 305 |
| MRAVL054.12aa | 54 | 306 |
| MRAVL055.12aa | 55 | 307 |
| MRAVL056.12aa | 56 | 308 |
| MRAVL057.12aa | 57 | 309 |
| MRAVL058.12aa | 58 | 310 |
| MRAVL059.12aa | 59 | 311 |
| MRAVL060.12aa | 60 | 312 |
| MRAVL096.12aa | 96 | 313 |
| MRAVL097.12aa | 97 | 314 |
| MRAVL098.12aa | 98 | 315 |
| MRAVL099.12aa | 99 | 316 |
| MRAVL100.12aa | 100 | 317 |
| MRAVL101.12aa | 101 | 318 |
| MRAVL102.12aa | 102 | 319 |
| MRAVL103.12aa | 103 | 320 |
| MRAVL104.12aa | 104 | 321 |
| MRAVL105.12aa | 105 | 322 |
| MRAVL106.12aa | 106 | 323 |
| MRAVL107.12aa | 107 | 324 |

TABLE 10
Engineered MRA light chain constant regions and
protease cleavage sequence insertion positions

| | Protease cleavage sequence | |
|---|---|---|
| Engineered MRA light | insertion position | SEQ |
| chain constant region | (EU numbering) | ID NO |
| k0.108.12aa | 109 (Kabat numbering 109) | 325 |
| k0.109.12aa | 110 (Kabat numbering 110) | 326 |
| k0.110.12aa | 111 (Kabat numbering 111) | 327 |
| k0.111.12aa | 112 (Kabat numbering 112) | 328 |
| k0.112.12aa | 113 (Kabat numbering 113) | 329 |
| k0.113.12aa | 114 (Kabat numbering 114) | 330 |
| k0.115.12aa | 116 (Kabat numbering 116) | 331 |
| k0.116.12aa | 117 (Kabat numbering 117) | 332 |
| k0.117.12aa | 118 (Kabat numbering 118) | 333 |
| k0.118.12aa | 119 (Kabat numbering 119) | 334 |
| k0.119.12aa | 120 (Kabat numbering 120) | 335 |
| k0.120.12aa | 121 (Kabat numbering 121) | 336 |
| k0.121.12aa | 122 (Kabat numbering 122) | 337 |
| k0.122.12aa | 123 (Kabat numbering 123) | 338 |
| k0.123.12aa | 124 (Kabat numbering 124) | 339 |
| k0.124.12aa | 125 (Kabat numbering 125) | 340 |
| k0.125.12aa | 126 (Kabat numbering 126) | 341 |
| k0.126.12aa | 127 (Kabat numbering 127) | 342 |
| k0.127.12aa | 128 (Kabat numbering 128) | 343 |
| k0.128.12aa | 129 (Kabat numbering 129) | 344 |
| k0.129.12aa | 130 (Kabat numbering 130) | 345 |
| k0.130.12aa | 131 (Kabat numbering 131) | 346 |

[1199] Engineered MRA antibodies shown in Table 11 were expressed by transient expression using the engineered MRA light chains thus prepared in combination with the MRA heavy chain and using FreeStyle 293 cells (Invitrogen Corp.) or Expi293 cells (Life Technologies Corp.) by a method known to those skilled in the art, and purified by a method known to those skilled in the art using protein A.

TABLE 11
Engineered MRA antibodies

| | SEQ ID NO of | SEQ ID NO of |
|---|---|---|
| Antibody name | heavy chain | light chain |
| MRAH-G1T4/MRAVL007.12aa-k0 | 208 | 414 |
| MRAH-G1T4/MRAVL008.12aa-k0 | 208 | 415 |
| MRAH-G1T4/MRAVL009.12aa-k0 | 208 | 416 |
| MRAH-G1T4/MRAVL010.12aa-k0 | 208 | 417 |
| MRAH-G1T4/MRAVL011.12aa-k0 | 208 | 418 |
| MRAH-G1T4/MRAVL012.12aa-k0 | 208 | 419 |
| MRAH-G1T4/MRAVL013.12aa-k0 | 208 | 420 |
| MRAH-G1T4/MRAVL014.12aa-k0 | 208 | 421 |
| MRAH-G1T4/MRAVL015.12aa-k0 | 208 | 422 |
| MRAH-G1T4/MRAVL016.12aa-k0 | 208 | 423 |
| MRAH-G1T4/MRAVL017.12aa-k0 | 208 | 424 |
| MRAH-G1T4/MRAVL018.12aa-k0 | 208 | 425 |
| MRAH-G1T4/MRAVL039.12aa-k0 | 208 | 426 |
| MRAH-G1T4/MRAVL040.12aa-k0 | 208 | 427 |
| MRAH-G1T4/MRAVL041.12aa-k0 | 208 | 428 |
| MRAH-G1T4/MRAVL042.12aa-k0 | 208 | 429 |
| MRAH-G1T4/MRAVL043.12aa-k0 | 208 | 430 |
| MRAH-G1T4/MRAVL044.12aa-k0 | 208 | 431 |
| MRAH-G1T4/MRAVL045.12aa-k0 | 208 | 432 |
| MRAH-G1T4/MRAVL049.12aa-k0 | 208 | 433 |
| MRAH-G1T4/MRAVL050.12aa-k0 | 208 | 434 |
| MRAH-G1T4/MRAVL051.12aa-k0 | 208 | 435 |
| MRAH-G1T4/MRAVL052.12aa-k0 | 208 | 436 |
| MRAH-G1T4/MRAVL053.12aa-k0 | 208 | 437 |
| MRAH-G1T4/MRAVL054.12aa-k0 | 208 | 438 |
| MRAH-G1T4/MRAVL055.12aa-k0 | 208 | 439 |
| MRAH-G1T4/MRAVL056.12aa-k0 | 208 | 440 |
| MRAH-G1T4/MRAVL057.12aa-k0 | 208 | 441 |
| MRAH-G1T4/MRAVL058.12aa-k0 | 208 | 442 |
| MRAH-G1T4/MRAVL059.12aa-k0 | 208 | 443 |
| MRAH-G1T4/MRAVL060.12aa-k0 | 208 | 444 |
| MRAH-G1T4/MRAVL096.12aa-k0 | 208 | 445 |
| MRAH-G1T4/MRAVL097.12aa-k0 | 208 | 446 |
| MRAH-G1T4/MRAVL098.12aa-k0 | 208 | 447 |
| MRAH-G1T4/MRAVL099.12aa-k0 | 208 | 448 |
| MRAH-G1T4/MRAVL100.12aa-k0 | 208 | 449 |
| MRAH-G1T4/MRAVL101.12aa-k0 | 208 | 450 |
| MRAH-G1T4/MRAVL102.12aa-k0 | 208 | 451 |
| MRAH-G1T4/MRAVL103.12aa-k0 | 208 | 452 |
| MRAH-G1T4/MRAVL104.12aa-k0 | 208 | 453 |
| MRAH-G1T4/MRAVL105.12aa-k0 | 208 | 454 |
| MRAH-G1T4/MRAVL106.12aa-k0 | 208 | 455 |
| MRAH-G1T4/MRAVL107.12aa-k0 | 208 | 456 |
| MRAH-G1T4/MRAL-k0.108.12aa | 208 | 457 |
| MRAH-G1T4/MRAL-k0.109.12aa | 208 | 458 |
| MRAH-G1T4/MRAL-k0.110.12aa | 208 | 459 |
| MRAH-G1T4/MRAL-k0.111.12aa | 208 | 460 |
| MRAH-G1T4/MRAL-k0.112.12aa | 208 | 461 |
| MRAH-G1T4/MRAL-k0.113.12aa | 208 | 462 |
| MRAH-G1T4/MRAL-k0.115.12aa | 208 | 463 |
| MRAH-G1T4/MRAL-k0.116.12aa | 208 | 464 |
| MRAH-G1T4/MRAL-k0.117.12aa | 208 | 465 |
| MRAH-G1T4/MRAL-k0.118.12aa | 208 | 466 |
| MRAH-G1T4/MRAL-k0.119.12aa | 208 | 467 |
| MRAH-G1T4/MRAL-k0.120.12aa | 208 | 468 |
| MRAH-G1T4/MRAL-k0.121.12aa | 208 | 469 |
| MRAH-G1T4/MRAL-k0.122.12aa | 208 | 470 |
| MRAH-G1T4/MRAL-k0.123.12aa | 208 | 471 |
| MRAH-G1T4/MRAL-k0.124.12aa | 208 | 472 |
| MRAH-G1T4/MRAL-k0.125.12aa | 208 | 473 |
| MRAH-G1T4/MRAL-k0.126.12aa | 208 | 474 |
| MRAH-G1T4/MRAL-k0.127.12aa | 208 | 475 |
| MRAH-G1T4/MRAL-k0.128.12aa | 208 | 476 |
| MRAH-G1T4/MRAL-k0.129.12aa | 208 | 477 |
| MRAH-G1T4/MRAL-k0.130.12aa | 208 | 478 |

### 15-2. Protease Cleavage Evaluation of Anti-Human IL6R Neutralizing Antibody Harboring Protease Cleavage Sequence in its Antibody Light Chain Variable Region

[1200] Whether the engineered MRA antibodies prepared in Example 15-1 would be cleaved by protease was verified. Recombinant Human Matriptase/ST14 Catalytic Domain (MT-SP1) (R&D Systems, Inc., 3946-SE-010) was used as the protease. 10 nM protease and 50 micro g/mL of each antibody were reacted in PBS under a condition of 37 degrees C. for 20 hours, followed by reducing SDS-PAGE. The results are shown in FIGS. 33A, 33B, 33C, 33D, 33E, 34A, and 34B. The protease-treated engineered MRA antibodies underwent cleavage at their light chains and generated a light chain band at a position with a smaller molecular weight than that of the light chains of protease-untreated engineered MRA antibodies (in the drawings, a band appearing around 25 kDa in the MT-SP1(−) lane).

### Example 16

[1201] 16-1. Introduction of Protease Cleavage Sequence to Polypeptide with Incorporated VL Binding to IL-1R

[1202] As shown in the previous Examples VHH could be used as antigen binding single-domain antibody in protease-activated polypeptide. VL single domain antibody, which binds to antigen alone, has been reported that VL single domain has further better physicochemical properties compared with VHH or VH single domain (J. Mol. Biol., 342 (2004), pp. 901-912, J. Mol. Biol. (2003) 325, 531-553). Thus we expected that VL single domain could be used for antigen binding domain in IgG-antibody-like molecule as shown in FIG. 35.

[1203] To construct protease-activated IgG antibody-like molecules, a protease cleavage sequence was inserted near the boundary between the anti-IL-1R1-VL (DOM4.122.23 (SEQ ID NO: 479) or DOM4.130.202 (SEQ ID NO: 480)), and either CH1 or Igkappa depending on the three IgG-antibody-like molecule formats shown in FIG. 35.

[1204] In the VL dimer type and VL×VH type1 format, three types of heavy chain constant regions shown in Table 13 (iSG1, kSG1, uPASG1) were designed such that peptide sequence i (SEQ ID NO: 508), k (SEQ ID NO: 509), or uPA (SEQ ID NO: 510) was inserted at a site near the boundary between VL DOM4.122.23 or DOM4.130.202, and CH1. i and k are reported sequences cleavable by MMP13, and uPA is cleavable by urokinase (uPA).

[1205] In the VL×VH type2 format, three types of light chain constant regions shown in Figure CK1B (iSK1, kSK1, uPASK1) were designed such that peptide sequence i (SEQ ID NO: 508), k (SEQ ID NO: 509), or uPA (SEQ ID NO: 510) was inserted at a site near the boundary between VL DOM4.122.23 or DOM4.130.202, and Igkappa.

[1206] Expression vectors encoding DOM4.122.23-iSG1 (SEQ ID NO: 492) DOM4.122.23-kSG1 (SEQ ID NO: 493), DOM4.122.23-uPASG1 (SEQ ID NO: 494), DOM4.130.202-iSG1 (SEQ ID NO: 495), DOM4.130.202-kSG1 (SEQ ID NO: 496), DOM4.130.202-uPASG1 (SEQ ID NO: 497), DOM4.122.23-iSK1 (SEQ ID NO: 502), DOM4.122.23-kSK1 (SEQ ID NO: 503), DOM4.122.23-uPASK1 (SEQ ID NO: 504), DOM4.130.202-iSK1 (SEQ ID NO: 505), DOM4.130.202-kSK1 (SEQ ID NO: 506), and DOM4.130.202-uPASK1 (SEQ ID NO: 507) were prepared by a method known to those skilled in the art.

[1207] Expression vector encoding VH3.23-SG1 (SEQ ID NO: 498) as heavy chain (variable region-constant region) having a human germline sequence was prepared by a method known to those skilled in the art.

[1208] Expression vectors encoding VK1.39-SK1 (SEQ ID NO: 499), VL1.40-lam1 (SEQ ID NO: 500), VH3.23-SK1 (SEQ ID NO: 501) as light chains (variable region-constant region) of various subclasses having a human germline sequence were prepared (VK1.39 (SEQ ID NO: 484), VL1.40 (SEQ ID NO: 485), VH3.23 (SEQ ID NO: 486), lam1 (SEQ ID NO: 488) by a method known to those skilled in the art).

16-2. Preparation of Polypeptide with Incorporated VL Binding and Cleavage Site to IL-1R

[1209] Protease-activated IgG antibody-like molecules shown in Table 12 below were expressed by transient expression using Expi 293 cells (Invitrogen Corp.) by a method known to those skilled in the art, and purified by a method known to those skilled in the art using protein A. Table 13 shows the name of each prepared antibody constant region, the insertion site of the amino acid sequence, and the inserted amino acid sequence. The insertion site is indicated by [insert].

TABLE 12
Protease-activated IgG antibody-like molecules

| IgG-antibody- | | | |
|---|---|---|---|
| like molecule | | SEQ ID NO of | SEQ ID NO of |
| format | IgG antibody-like molecule | heavy chain | light chain |
| VL dimer | DOM4.122.23-iSG1/VK1.39-SK1 | 492 | 499 |
| type | DOM4.122.23-kSG1/VK1.39-SK1 | 493 | |
| | DOM4.122.23-uPASG1/VK1.39-SK1 | 494 | |
| | DOM4.130.202-iSG1/VK1.39-SK1 | 495 | |
| | DOM4.130.202-kSG1/VK1.39-SK1 | 496 | |
| | DOM4.130.202-uPASG1/VK1.39-SK1 | 497 | |
| | DOM4.122.23-iSG1/VL1.40-lam1 | 492 | 500 |
| | DOM4.122.23-kSG1/VL1.40-lam1 | 493 | |
| | DOM4.122.23-uPASG1/VL1.40-lam1 | 494 | |
| | DOM4.130.202-iSG1/VL1.40-lam1 | 495 | |
| | DOM4.130.202-kSG1/VL1.40-lam1 | 496 | |
| | DOM4.130.202-uPASG1/VL1.40-lam1 | 497 | |
| VL × VH | DOM4.122.23-iSG1/VH3.23-SK1 | 492 | 501 |
| type1 | DOM4.122.23-kSG1/VH3.23-SK1 | 493 | |
| | DOM4.122.23-uPASG1/VH3.23-SK1 | 494 | |
| | DOM4.130.202-iSG1/VH3.23-SK1 | 495 | |
| | DOM4.130.202-kSG1/VH3.23-SK1 | 496 | |
| | DOM4.130.202-uPASG1/VH3.23-SK1 | 497 | |
| VL × VH | VH3.23-SG1/DOM4.122.23-iSK1 | 498 | 502 |
| type2 | VH3.23-SG1/DOM4.122.23-kSK1 | | 503 |
| | VH3.23-SG1/DOM4.122.23-uPASK1 | | 504 |
| | VH3.23-SG1/DOM4.130.202-iSK1 | | 505 |
| | VH3.23-SG1/DOM4.130.202-kSK1 | | 506 |
| | VH3.23-SG1/DOM4.130.202-uPASK1 | | 507 |

TABLE 13
The name of each prepared antibody
constant region, the insertion
site of the amino acid sequence
and the inserted amino acid sequence

| | | Inserted |
|---|---|---|
| Name of | | amino |
| Constant | Insertion | acid |
| region | site | sequence |
| iSG1 | A [insert] | GAGPQGLA |
| (SEQ ID | STKGPS | GQRGIVAG |
| NO: 481) | (SEQ ID | (SEQ ID |
| | NO: 623) | NO: 508) |
| kSG1 | A [insert] | GPPGPQG |
| (SEQ ID | STKGPS | LAGQRGI |
| NO: 482) | (SEQ ID | VGL |
| | NO: 623) | (SEQ ID |
| | | NO: 509) |
| UpaSG1 | A [insert] | TSTSGR |
| (SEQ ID | STKGPS | SANPRG |
| NO: 483) | (SEQ ID | (SEQ ID |
| | NO: 623) | NO: 510) |
| iSK1 | R [insert] | GAGPQGLA |
| (SEQ ID | TVAAPS | GQRGIVAG |
| NO: 489) | (SEQ ID | (SEQ ID |
| | NO: 624) | NO: 508) |
| KSK1 | R [insert] | GPPGPQGL |
| (SEQ ID | TVAAPS | AGQRGIVGL |
| NO: 490) | (SEQ ID | (SEQ ID |
| | NO: 624) | NO: 509) |
| uPASK1 | R [insert] | TSTSGR |
| (SEQ ID | TVAAPS | SANPRG |
| NO: 491) | (SEQ ID | (SEQ ID |
| | NO: 624) | NO: 510) |

### Example 17: Protease Cleavage Evaluation of IgG Antibody-Like Molecules with Anti-IL-1R1 Binding Domain

[1210] MMP13 (R&D systems, 511-MM-010) was activated with 1 micromolar of 4-aminophenylmercuric acetate (APMA, Sigma, A9563). Activated MMP13 or uPA (R&D systems, 1310-SE-010) were added to IgG antibody-like molecules with anti-IL-1R1 binding domain described in Example 16. The final concentration of IgG antibody-like molecules is 800 nM and the final concentration of proteases is 25 nM. Reaction mixtures were incubated at 37 degrees C. for 20 hours. The degree of the cleavage was evaluated by reducing and non-reducing SDS-PAGE. The protease cleavage of IgG antibody-like molecules was confirmed and correspond bands of anti-IL-1R1 domain antibody were observed between 15 kDa and 10 kDa (FIGS. 36, 37, and 38).

### Example 18: Cell Assay with IgG Antibody-Like Molecules with Anti-IL-1R1 Binding Domain

[1211] HEK-Blue™ IL-1beta cells were maintained in DMEM medium (Gibco) supplemented with 10% fetal bovine serum, 50 U/mL streptomycin, 50 micro g/mL penicillin, 100 micro g/mL Normocin™, 200 micro g/mL of Hygromycin B Gold and 100 micro g/mL of Zeocin™. During functional assay, the medium for cells was changed to assay medium (DMEM with 10% FBS, 50 U/mL streptomycin, 50 micro g/mL penicillin and 100 micro g/mL Normocin™) and seeded to 96-well plates with seeding density of 5E4 cells per well. Then, IgG antibody-like molecules reaction mixture, as described in Example 17, were diluted 100× with assay medium and incubated together with HEK-Blue™ IL-1beta cells for an hour at 37 degrees C. incubator supplied with 5% CO2. Human recombinant IL-1beta was then added to the wells to a final concentration of 1 ng/mL for cell stimulation overnight at 37 degrees C. incubator supplied with 5% CO2. Cell supernatant was mixed with QUANTI-Blue™ and incubated at 37 degrees C. for 30 minutes, after which the optical density at 620 nm was measured in a colorimetric plate reader. Neutralizing activity was enhanced after protease treatment with IgG antibody-like molecules with anti-IL-1R1 binding domain (FIGS. 39 and 40).

### Example 19: Preparation of Protease Cleavage Sequence to Polypeptide with Incorporated VL Binding to CD154

[1212] To construct protease-activated IgG antibody-like molecules, a protease cleavage sequence was inserted near the boundary between the anti-CD154 VL (DOM8.8 (SEQ ID NO: 533) and Igkappa. Expression vectors encoding heavy chain MORH-wtG4d (SEQ ID NO: 534), heavy chain MORH-G1d (SEQ ID NO: 535), MORH-IgG2dGK (SEQ ID NO: 536) and MDXH-mFa55 (SEQ ID NO: 537) were prepared by a method known to those skilled in the art. Heavy chain and protease cleavage sequence containing light chain DOM8.8-Pk0MT (SEQ ID NO: 538) were co-expressed by transient expression using Expi 293 cells (Invitrogen Corp.) by a method known to those skilled in the art, and purified by a method known to those skilled in the art using protein A.

TABLE 14

| | | | Inserted | |
|---|---|---|---|---|
| | | | protease | |
| | | | digestion | |
| | Heavy | Light | sequence | |
| | chain | chain | with | |
| | sequence | sequence | flexible | Insertion |
| Name | ID | ID | linker | position |
| MORH- | 534 | 538 | GSGLSGRS | KVEIK |
| wtG4d/ | | | DNHGSSG | [insert] |
| DOM8.8- | | | GSS | RTVAA |
| Pk0MT | | | (SEQ ID | (SEQ ID |
| | | | NO: 625) | NO: 626) |
| MORH- | 535 | 538 | GSGLSGRS | KVEIK |
| G1d/DOM8.8- | | | DNHGSSG | [insert] |
| Pk0MT | | | GSS | RTVAA |
| | | | (SEQ ID | (SEQ ID |
| | | | NO: 625) | NO: 626) |
| MORH- | 536 | 538 | GSGLSGRS | KVEIK |
| IgG2dGK/ | | | DNHGSSG | [insert] |
| DOM8.8- | | | GSS | RTVAA |
| Pk0MT | | | (SEQ ID | (SEQ ID |
| | | | NO: 625) | NO: 626) |
| MDXH- | 537 | 538 | GSGLSGR | KVEIK |
| mFa55/ | | | SDNHGSSG | [insert] |
| DOM8.8- | | | GSS | RTVAA |
| Pk0MT | | | (SEQ ID | (SEQ ID |
| | | | NO: 625) | NO: 626) |

### Example 20: Protease Cleavage Evaluation of IgG Antibody-Like Molecules Harboring Protease Cleavage Sequence

[1213] The IgG antibody-like molecule prepared in Example 19 was cleaved by protease in the same way as in Example 3, and the cleavage was evaluated by reducing SDS-PAGE. The protease concentration was set to 25 nM, and Octet RED (Pall ForteBio Corp.) was used in the assay. The results of evaluation by reducing SDS-PAGE are shown in FIG. 41 and protease cleavage was confirmed in each IgG-antibody like molecule.

[1214] Next, the CD154 binding evaluation of VL released by protease treatment was conducted in the same way as in Example 3. N terminal Flag-tagged CD154 (SEQ ID NO: 539) was prepared by a method known to those skilled in the art. Then, Biotinylation of CD154 was conducted followed by the manufacture's protocol. Specifically, biotinylated CD154 was bound to a streptavidin sensor (Pall ForteBio Corp., 18-5021), and each cleaved IgG antibody-like molecule “Protease treated IgG-antibody like molecule” or “Protease untreated IgG-antibody like molecule” was allowed to act thereon, followed by binding evaluation at 27 degrees C. Sensorgrams showing continuous responses measured using Octet RED are shown in FIG. 42-1 and FIG. 42-2.

[1215] As a result, the IgG antibody-like molecules were confirmed to undergo protease cleavage at the protease cleavage sequence and retrieved antigen binding after protease cleavage.

### Example 21: Introduction of Amino Acid Alteration to Interface Site Between VH or VHH, and VL in Polypeptide to Attenuate Antigen Binding of Single Domain Antibody in the Absence of Proteases

[1216] As shown in the Example 4, even if VHH incorporated in a polypeptide does not lose its antigen binding activity immediately after association with particular VL, the antigen binding activity can be lost by introducing an association promoting mutation to an amino acid present at the interface between the VHH and the VL. In the case of VL single domain also could be introduced mutations to improve VH/VL association. As for enhancement of association between VH and VL several mutations have been reported in Nature Biotechnology volume 32, pages 191-198 (2014), Biophys. J. 75, 1473-1482 (1998), Protein Eng. Des. Sel. 23, 667-677 (2010), MAbs. 2017 February-March; 9(2): 182-212 and WO2013065708. Specifically the combinations of mutations were shown in the Table 15.

TABLE 15
Examples of mutations

| VH | CH1 | VL | CL |
|---|---|---|---|
| 39K, 62E | H172A, F174G | 1R, 38D, (36F) | L135Y, S176W |
| 39Y | — | 38R | — |
| | T192E | | N137K, S114A |
| | L143Q, S188V | | V133T, S176V |
| | F126C | | S121C |
| 39E | — | 38K | — |
| 39K | — | 38E | — |
| V37F, L45W | — | Y87A, F98M | — |

### Reference Example 1: Preparation of Biotinylated Plexin A1

[1217] Biotinylated plexin A1 (also referred to as biotin-labeled human plexin A1) was prepared by a method known to those skilled in the art. Specifically, a gene fragment encoding a specific sequence (AviTag sequence; SEQ ID NO: 36) to be biotinylated by biotin ligase and a gene fragment encoding a FLAG tag sequence (SEQ ID NO: 199; DYKDDDDK) were linked via a gene fragment encoding a linker constituted by glycine and serine to downstream of a gene fragment encoding the extracellular region of plexin A1. A gene fragment encoding a protein containing plexin A1 linked to the AviTag sequence and the FLAG tag sequence (SEQ ID NO: 200) was integrated to a vector for expression in animal cells. The constructed plasmid vector was transferred to FreeStyle 293 cells (Invitrogen Corp.) using 293Fectin (Invitrogen Corp.). In this operation, the cells were cotransfected with a gene for EBNA1 (SEQ ID NO: 57) expression and a gene for biotin ligase (BirA; SEQ ID NO: 58) expression, and biotin was further added thereto for the purpose of biotin-labeling plexin A1. The cells transfected according to the procedures mentioned above were cultured at 37 degrees C. under 8% CO₂ and caused to secrete the protein of interest (biotinylated plexin A1) into the culture supernatant. This cell culture solution was filtered through a 0.22 micro m bottle-top filter to obtain a culture supernatant.

[1218] A column was packed with Anti FLAG M2 agarose (Sigma-Aldrich Co. LLC, #A2220) to prepare a FLAG column. The FLAG column was equilibrated in advance with D-PBS(−). The culture supernatant was applied thereto to bind the biotinylated plexin A1 to the column. Subsequently, the biotinylated plexin A1 was eluted using FLAG peptide dissolved in D-PBS(−). Associates were removed from this eluate by gel filtration chromatography using HiLoad 26/600 Superdex 200 pg, 320 mL (GE Healthcare Japan Corp., 28-9893-36) to obtain purified biotinylated plexin A1.

[1219] The embodiments of the invention mentioned above are described in detail with reference to actual examples and illustrated examples with the aim of helping clear understanding. However, the description and illustration in the present specification should not be interpreted as limiting the scope of the present invention. The disclosure of all patent literatures and scientific literatures cited herein is explicitly incorporated herein by reference in its entirety.

### INDUSTRIAL APPLICABILITY

[1220] The polypeptide of the present invention comprising an antigen binding domain and a carrying moiety having a longer half-life in blood than that of the antigen binding domain and having an inhibiting domain that inhibits the binding activity of the antigen binding domain, and a pharmaceutical composition comprising the polypeptide can transport the antigen binding domain in blood while inhibited the antigen binding activity of the antigen binding domain. Also, use of the polypeptide of the present invention can allow the antigen binding domain to exert its antigen binding activity specifically at a disease site. Furthermore, since the antigen binding domain has a shorter half-life at the time of exerting its antigen binding activity than at the time of transport, the risk of acting systemically is decreased. Thus, the polypeptide and the pharmaceutical composition of the present invention are very useful in the treatment of a disease.

[1221] A single-domain antibody whose antigen binding activity is inhibited by associating with particular VL, VH or VHH can be screened for or produced as one example of the antigen binding domain to thereby efficiently produce the polypeptide of the present invention. Furthermore, a necessary antigen binding domain can be efficiently obtained when the polypeptide of the present invention is prepared by use of a library including the single-domain antibody whose antigen binding activity is inhibited by associating with particular VL, VH or VHH, as one example of the antigen binding domain that can be used in the polypeptide of the present invention.

### Sequence Listing

1. A polypeptide comprising an antigen binding domain that binds to IL-1R1 (IL-1R1 binding domain) and a carrying moiety, wherein the IL-R1 binding domain has a shorter half-life in blood than that of the carrying moiety that has an inhibiting domain that inhibits the IL-1R1 binding activity of the IL-1R1 binding domain.

2. The polypeptide according to claim 1, wherein the antigen binding domain is capable of being released from the polypeptide, and the antigen binding domain released from the polypeptide has higher antigen binding activity than that before the release.

3. The polypeptide according to claim 1 or 2, wherein the inhibiting domain of the carrying moiety associates with the antigen binding domain and thereby inhibits the antigen binding activity of the antigen binding domain.

4. The polypeptide according to claim 2 or 3, wherein the polypeptide comprises a cleavage site, wherein the cleavage site is cleaved so that the antigen binding domain becomes capable of being released from the polypeptide, or/and the association of the inhibiting domain of the carrying moiety with the antigen binding domain is canceled.

5. The polypeptide according to claim 4, wherein the cleavage site comprises a protease cleavage sequence.

6. The polypeptide according to any of claims 1 to 5, wherein the antigen binding domain comprises a single-domain antibody or IL-1R antagonist or is a single-domain antibody or IL-1R antagonist, wherein the inhibiting domain of the carrying moiety inhibits the antigen binding activity of the single-domain antibody or IL-1R antagonist.

7. The polypeptide according to any of claims 1 to 6, wherein the antigen binding domain comprises a single-domain antibody, and the inhibiting domain of the carrying moiety is VHH, antibody VH, or antibody VL, wherein the antigen binding activity of the single-domain antibody can be inhibited by the VHH, or the antibody VH, or the antibody VL.

8. The polypeptide according to any of claims 1 to 7, wherein the carrying moiety comprises an antibody constant region.

9. The polypeptide according to claim 8, wherein the polypeptide has a protease cleavage sequence, wherein the protease cleavage sequence is located near the boundary between the antigen binding domain and the antibody constant region.

10. A polypeptide comprising an IL-1R1 binding domain that has a shorter half-life in blood than that of a carrying moiety that has an inhibiting domain that inhibits the IL-1R1 binding activity of the IL-1R1 binding domain, wherein the IL-1R1 binding domain binds to an epitope within IL-1R1, and/or wherein the IL-1R1 domain competes for binding the epitope with a single-domain antibody VL selected from the group consisting of 1) and 2) below:
1) a single-domain antibody VL comprising the amino acid sequence of SEQ ID NO: 479, and
2) a single-domain antibody VL comprising the amino acid sequence of SEQ ID NO: 480.

11. A polypeptide comprising an antigen binding domain and a carrying moiety, wherein the antigen binding domain has a shorter half-life in blood than that of the carrying moiety that has an inhibiting domain that inhibits the antigen binding activity of the antigen binding domain, wherein the antigen is selected from the group consisting of IL-1alpha, IL-1beta and IL-1RAcP.

12. A pharmaceutical composition comprising the polypeptide of any of claims 1 to 11.

13. A pharmaceutical composition for treating a subject having an IL-1R1 mediated disease or disorder, comprising an effective amount of the polypeptide of any one of claims 1 to 11.

14. A polypeptide comprising an antigen binding domain VL and a carrying moiety, wherein the antigen binding domain VL has a shorter half-life in blood than that of the carrying moiety that has an inhibiting domain that inhibits the antigen binding activity of the antigen binding domain VL.

15. A polypeptide comprising an antigen binding domain VL and a carrying moiety, wherein the antigen binding domain VL has a shorter half-life in blood than that of the carrying moiety that has an inhibiting domain VL that inhibits the antigen binding activity of the antigen binding domain VL.

The application's sequence listing, which the Patent Office published only in electronic form, follows.

SEQUENCE LISTING (626 sequences)

SEQ ID NO: 1 - protein, 127 aa, Artificial Sequence
  an artificially synthesized sequence
EVQLVESGGGLVQPGGSLRLSCAASGFTFDDYGMSWVRQAPGKALEWVSAISWNGNNTYYTESMKGRFTISRDNAKNTLYLQMNSLRPEDTAVYYCVKGSTAIVGVPPTYPDEYDYWGQGTLVTVSS

SEQ ID NO: 2 - protein, 455 aa, Artificial Sequence
  an artificially synthesized sequence
EVQLVESGGGLVQPGGSLRLSCAASGFTFDDYGMSWVRQAPGKALEWVSAISWNGNNTYYTESMKGRFTISRDNAKNTLYLQMNSLRPEDTAVYYCVKGSTAIVGVPPTYPDEYDYWGQGTLVTVSSASTKGPSVFPLAPSSKSTSGGTAALGCLVKDYFPEPVTVSWNSGALTSGVHTFPAVLQSSGLYSLSSVVTVPSSSLGTQTYICNVNHKPSNTKVDKKVEPKSCDKTHTCPPCPAPELLGGPSVFLFPPKPKDTLMISRTPEVTCVVVDVSHEDPEVKFNWYVDGVEVHNAKTKPREEQYNSTYRVVSVLTVLHQDWLNGKEYKCKVSNKALPAPIEKTISKAKGQPREPQVYTLPPSREEMTKNQVSLTCLVKGFYPSDIAVEWESNGQPENNYKTTPPVLDSDGSFFLYSKLTVDKSRWQQGNVFSCSVMHEALHNHYTQKSLSLSP

SEQ ID NO: 3 - protein, 214 aa, Artificial Sequence
  an artificially synthesized sequence
DIQMTQSPSSLSASVGDRVTITCRASQSISSYLNWYQQKPGKAPKLLIYAASSLQSGVPSRFSGSGSGTDFTLTISSLQPEDFATYYCLQFDSYPLTFGGGTKVEIKRTVAAPSVFIFPPSDEQLKSGTASVVCLLNNFYPREAKVQWKVDNALQSGNSQESVTEQDSKDSTYSLSSTLTLSKADYEKHKVYACEVTHQGLSSPVTKSFNRGEC

SEQ ID NO: 4 - protein, 219 aa, Artificial Sequence
  an artificially synthesized sequence
DIVMTQSPLSLPVTPGEPASISCRSSQSLLHSNGYNYLDWYLQKPGQSPQLLIYLGSNRASGVPDRFSGSGSGTDFTLKISRVEAEDVGVYYCMQRLHWPLTFGGGTKVEIKRTVAAPSVFIFPPSDEQLKSGTASVVCLLNNFYPREAKVQWKVDNALQSGNSQESVTEQDSKDSTYSLSSTLTLSKADYEKHKVYACEVTHQGLSSPVTKSFNRGEC

SEQ ID NO: 5 - protein, 215 aa, Artificial Sequence
  an artificially synthesized sequence
EIVLTQSPGTLSLSPGERATLSCRASQSVSSSYLAWYQQKPGQAPRLLIYGASSRATGIPDRFSGSGSGTDFTLTISRLEPEDFAVYYCQQYGRSPLTFGGGTKVEIKRTVAAPSVFIFPPSDEQLKSGTASVVCLLNNFYPREAKVQWKVDNALQSGNSQESVTEQDSKDSTYSLSSTLTLSKADYEKHKVYACEVTHQGLSSPVTKSFNRGEC

SEQ ID NO: 6 - protein, 217 aa, Artificial Sequence
  an artificially synthesized sequence
QSVLTQPPSVSGAPGQRVTISCTGSSSNIGAGYDVHWYQQLPGTAPKLLIYGNSNRPSGVPDRFSGSKSGTSASLAITGLQAEDEADYYCQSYDNSLNAVVFGGGTKLTVLGQPKAAPSVTLFPPSSEELQANKATLVCLISDFYPGAVTVAWKADSSPVKAGVETTTPSKQSNNKYAASSYLSLTPEQWKSHRSYSCQVTHEGSTVEKTVAPTECS

SEQ ID NO: 7 - protein, 216 aa, Artificial Sequence
  an artificially synthesized sequence
QSVLTQPPSASGTPGQRVTISCSGSSSNIGSNTVNWYQQLPGTAPKLLIYSNNQRPSGVPDRFSGSKSGTSASLAISGLQSEDEADYYCGTWDGGVTGVVFGGGTKLTVLGQPKAAPSVTLFPPSSEELQANKATLVCLISDFYPGAVTVAWKADSSPVKAGVETTTPSKQSNNKYAASSYLSLTPEQWKSHRSYSCQVTHEGSTVEKTVAPTECS

SEQ ID NO: 8 - protein, 217 aa, Artificial Sequence
  an artificially synthesized sequence
QSALTQPASVSGSPGQSITISCTGTSSDVGGYNYVSWYQQHPGKAPKLMIYEVSNRPSGVSNRFSGSKSGNTASLTISGLQAEDEADYYCSSYRSGYTLVVFGGGTKLTVLGQPKAAPSVTLFPPSSEELQANKATLVCLISDFYPGAVTVAWKADSSPVKAGVETTTPSKQSNNKYAASSYLSLTPEQWKSHRSYSCQVTHEGSTVEKTVAPTECS

SEQ ID NO: 9 - protein, 213 aa, Artificial Sequence
  an artificially synthesized sequence
SYVLTQPPSVSVAPGKTARITCGGNNIGSKSVHWYQQKPGQAPVLVIYYDSDRPSGIPERFSGSNSGNTATLTISRVEAGDEADYYCQAWDSSTDVVFGGGTKLTVLGQPKAAPSVTLFPPSSEELQANKATLVCLISDFYPGAVTVAWKADSSPVKAGVETTTPSKQSNNKYAASSYLSLTPEQWKSHRSYSCQVTHEGSTVEKTVAPTECS

SEQ ID NO: 10 - protein, 107 aa, Homo sapiens [sequence omitted]

SEQ ID NO: 11 - protein, 106 aa, Homo sapiens
GQPKAAPSVTLFPPSSEELQANKATLVCLISDFYPGAVTVAWKADSSPVKAGVETTTPSKQSNNKYAASSYLSLTPEQWKSHRSYSCQVTHEGSTVEKTVAPTECS

SEQ ID NO: 12 - protein, 8 aa, Artificial Sequence
  an artificially synthesized sequence
LSGRSDNH

SEQ ID NO: 13 - protein, 463 aa, Artificial Sequence
  an artificially synthesized sequence
EVQLVESGGGLVQPGGSLRLSCAASGFTFDDYGMSWVRQAPGKALEWVSAISWNGNNTYYTESMKGRFTISRDNAKNTLYLQMNSLRPEDTAVYYCVKGSTAIVGVPPTYPDEYDYWGQGTLVTVSSASLSGRSDNHTKGPSVFPLAPSSKSTSGGTAALGCLVKDYFPEPVTVSWNSGALTSGVHTFPAVLQSSGLYSLSSVVTVPSSSLGTQTYICNVNHKPSNTKVDKKVEPKSCDKTHTCPPCPAPELLGGPSVFLFPPKPKDTLMISRTPEVTCVVVDVSHEDPEVKFNWYVDGVEVHNAKTKPREEQYNSTYRVVSVLTVLHQDWLNGKEYKCKVSNKALPAPIEKTISKAKGQPREPQVYTLPPSREEMTKNQVSLTCLVKGFYPSDIAVEWESNGQPENNYKTTPPVLDSDGSFFLYSKLTVDKSRWQQGNVFSCSVMHEALHNHYTQKSLSLSP

SEQ ID NO: 14 - protein, 473 aa, Artificial Sequence
  an artificially synthesized sequence
EVQLVESGGGLVQPGGSLRLSCAASGFTFDDYGMSWVRQAPGKALEWVSAISWNGNNTYYTESMKGRFTISRDNAKNTLYLQMNSLRPEDTAVYYCVKGSTAIVGVPPTYPDEYDYWGQGTLVTVSSASSGGSGLSGRSDNHGSSGGTKGPSVFPLAPSSKSTSGGTAALGCLVKDYFPEPVTVSWNSGALTSGVHTFPAVLQSSGLYSLSSVVTVPSSSLGTQTYICNVNHKPSNTKVDKKVEPKSCDKTHTCPPCPAPELLGGPSVFLFPPKPKDTLMISRTPEVTCVVVDVSHEDPEVKFNWYVDGVEVHNAKTKPREEQYNSTYRVVSVLTVLHQDWLNGKEYKCKVSNKALPAPIEKTISKAKGQPREPQVYTLPPSREEMTKNQVSLTCLVKGFYPSDIAVEWESNGQPENNYKTTPPVLDSDGSFFLYSKLTVDKSRWQQGNVFSCSVMHEALHNHYTQKSLSLSP

SEQ ID NO: 15 - protein, 464 aa, Artificial Sequence
  an artificially synthesized sequence
EVQLVESGGGLVQPGGSLRLSCAASGFTFDDYGMSWVRQAPGKALEWVSAISWNGNNTYYTESMKGRFTISRDNAKNTLYLQMNSLRPEDTAVYYCVKGSTAIVGVPPTYPDEYDYWGQGTLVTVLSGRSDNHGSSASTKGPSVFPLAPSSKSTSGGTAALGCLVKDYFPEPVTVSWNSGALTSGVHTFPAVLQSSGLYSLSSVVTVPSSSLGTQTYICNVNHKPSNTKVDKKVEPKSCDKTHTCPPCPAPELLGGPSVFLFPPKPKDTLMISRTPEVTCVVVDVSHEDPEVKFNWYVDGVEVHNAKTKPREEQYNSTYRVVSVLTVLHQDWLNGKEYKCKVSNKALPAPIEKTISKAKGQPREPQVYTLPPSREEMTKNQVSLTCLVKGFYPSDIAVEWESNGQPENNYKTTPPVLDSDGSFFLYSKLTVDKSRWQQGNVFSCSVMHEALHNHYTQKSLSLSP

SEQ ID NO: 16 - protein, 473 aa, Artificial Sequence
  an artificially synthesized sequence
EVQLVESGGGLVQPGGSLRLSCAASGFTFDDYGMSWVRQAPGKALEWVSAISWNGNNTYYTESMKGRFTISRDNAKNTLYLQMNSLRPEDTAVYYCVKGSTAIVGVPPTYPDEYDYWGQGTLVTVSGGSGLSGRSDNHGSSGGSSASTKGPSVFPLAPSSKSTSGGTAALGCLVKDYFPEPVTVSWNSGALTSGVHTFPAVLQSSGLYSLSSVVTVPSSSLGTQTYICNVNHKPSNTKVDKKVEPKSCDKTHTCPPCPAPELLGGPSVFLFPPKPKDTLMISRTPEVTCVVVDVSHEDPEVKFNWYVDGVEVHNAKTKPREEQYNSTYRVVSVLTVLHQDWLNGKEYKCKVSNKALPAPIEKTISKAKGQPREPQVYTLPPSREEMTKNQVSLTCLVKGFYPSDIAVEWESNGQPENNYKTTPPVLDSDGSFFLYSKLTVDKSRWQQGNVFSCSVMHEALHNHYTQKSLSLSP

SEQ ID NO: 17 - protein, 464 aa, Artificial Sequence
  an artificially synthesized sequence
EVQLVESGGGLVQPGGSLRLSCAASGFTFDDYGMSWVRQAPGKALEWVSAISWNGNNTYYTESMKGRFTISRDNAKNTLYLQMNSLRPEDTAVYYCVKGSTAIVGVPPTYPDEYDYWGQGTLVTVSSASTKLSGRSDNHGGPSVFPLAPSSKSTSGGTAALGCLVKDYFPEPVTVSWNSGALTSGVHTFPAVLQSSGLYSLSSVVTVPSSSLGTQTYICNVNHKPSNTKVDKKVEPKSCDKTHTCPPCPAPELLGGPSVFLFPPKPKDTLMISRTPEVTCVVVDVSHEDPEVKFNWYVDGVEVHNAKTKPREEQYNSTYRVVSVLTVLHQDWLNGKEYKCKVSNKALPAPIEKTISKAKGQPREPQVYTLPPSREEMTKNQVSLTCLVKGFYPSDIAVEWESNGQPENNYKTTPPVLDSDGSFFLYSKLTVDKSRWQQGNVFSCSVMHEALHNHYTQKSLSLSP

SEQ ID NO: 18 - protein, 473 aa, Artificial Sequence
  an artificially synthesized sequence
EVQLVESGGGLVQPGGSLRLSCAASGFTFDDYGMSWVRQAPGKALEWVSAISWNGNNTYYTESMKGRFTISRDNAKNTLYLQMNSLRPEDTAVYYCVKGSTAIVGVPPTYPDEYDYWGQGTLVTVSSASTKSGGSGLSGRSDNHGSSGGGPSVFPLAPSSKSTSGGTAALGCLVKDYFPEPVTVSWNSGALTSGVHTFPAVLQSSGLYSLSSVVTVPSSSLGTQTYICNVNHKPSNTKVDKKVEPKSCDKTHTCPPCPAPELLGGPSVFLFPPKPKDTLMISRTPEVTCVVVDVSHEDPEVKFNWYVDGVEVHNAKTKPREEQYNSTYRVVSVLTVLHQDWLNGKEYKCKVSNKALPAPIEKTISKAKGQPREPQVYTLPPSREEMTKNQVSLTCLVKGFYPSDIAVEWESNGQPENNYKTTPPVLDSDGSFFLYSKLTVDKSRWQQGNVFSCSVMHEALHNHYTQKSLSLSP

SEQ ID NO: 19 - protein, 121 aa, Artificial Sequence [sequence omitted]

SEQ ID NO: 20 - protein, 121 aa, Artificial Sequence
  an artificially synthesized sequence
EVQLVESGGGLVQPGGSLRLSCAASGSVFKINVMAWVRQAPGKGLEWVAGIISGGSTSYADSVKGRFTISRDNAKNTLYLQMNSLRPEDTAVYYCAFITTESDYDLGRRYWGQGTLVTVSS

SEQ ID NO: 21 - protein, 330 aa, Homo sapiens [sequence omitted]

SEQ ID NO: 22 - protein, 326 aa, Homo sapiens
ASTKGPSVFPLAPCSRSTSESTAALGCLVKDYFPEPVTVSWNSGALTSGVHTFPAVLQSSGLYSLSSVVTVPSSNFGTQTYTCNVDHKPSNTKVDKTVERKCCVECPPCPAPPVAGPSVFLFPPKPKDTLMISRTPEVTCVVVDVSHEDPEVQFNWYVDGVEVHNAKTKPREEQFNSTFRVVSVLTVVHQDWLNGKEYKCKVSNKGLPAPIEKTISKTKGQPREPQVYTLPPSREEMTKNQVSLTCLVKGFYPSDIAVEWESNGQPENNYKTTPPMLDSDGSFFLYSKLTVDKSRWQQGNVFSCSVMHEALHNHYTQKSLSLSPGK

SEQ ID NO: 23 - protein, 377 aa, Homo sapiens
ASTKGPSVFPLAPCSRSTSGGTAALGCLVKDYFPEPVTVSWNSGALTSGVHTFPAVLQSSGLYSLSSVVTVPSSSLGTQTYTCNVNHKPSNTKVDKRVELKTPLGDTTHTCPRCPEPKSCDTPPPCPRCPEPKSCDTPPPCPRCPEPKSCDTPPPCPRCPAPELLGGPSVFLFPPKPKDTLMISRTPEVTCVVVDVSHEDPEVQFKWYVDGVEVHNAKTKPREEQYNSTFRVVSVLTVLHQDWLNGKEYKCKVSNKALPAPIEKTISKTKGQPREPQVYTLPPSREEMTKNQVSLTCLVKGFYPSDIAVEWESSGQPENNYNTTPPMLDSDGSFFLYSKLTVDKSRWQQGNIFSCSVMHEALHNRFTQKSLSLSPGK

SEQ ID NO: 24 - protein, 327 aa, Homo sapiens
ASTKGPSVFPLAPCSRSTSESTAALGCLVKDYFPEPVTVSWNSGALTSGVHTFPAVLQSSGLYSLSSVVTVPSSSLGTKTYTCNVDHKPSNTKVDKRVESKYGPPCPSCPAPEFLGGPSVFLFPPKPKDTLMISRTPEVTCVVVDVSQEDPEVQFNWYVDGVEVHNAKTKPREEQFNSTYRVVSVLTVLHQDWLNGKEYKCKVSNKGLPSSIEKTISKAKGQPREPQVYTLPPSQEEMTKNQVSLTCLVKGFYPSDIAVEWESNGQPENNYKTTPPVLDSDGSFFLYSRLTVDKSRWQEGNVFSCSVMHEALHNHYTQKSLSLSLGK

SEQ ID NO: 25 - protein, 6 aa, Artificial Sequence
  an artificially synthesized sequence
PLGLAG

SEQ ID NO: 26 - protein, 8 aa, Artificial Sequence
  an artificially synthesized sequence
VPLSLTMG

SEQ ID NO: 27 - protein, 5 aa, Artificial Sequence
  an artificially synthesized sequence
GSGGS

SEQ ID NO: 28 - protein, 4 aa, Artificial Sequence
  an artificially synthesized sequence
GGGS

SEQ ID NO: 29 - protein, 4 aa, Artificial Sequence
  an artificially synthesized sequence
GGSG

SEQ ID NO: 30 - protein, 5 aa, Artificial Sequence
  an artificially synthesized sequence
GGSGG

SEQ ID NO: 31 - protein, 5 aa, Artificial Sequence
  an artificially synthesized sequence
GSGSG

SEQ ID NO: 32 - protein, 5 aa, Artificial Sequence
  an artificially synthesized sequence
GSGGG

SEQ ID NO: 33 - protein, 5 aa, Artificial Sequence
  an artificially synthesized sequence
GGGSG

SEQ ID NO: 34 - protein, 5 aa, Artificial Sequence
  an artificially synthesized sequence
GSSSG

SEQ ID NO: 35 - protein, 338 aa, Homo sapiens
LAPRRCPAQEVARGVLTSLPGDSVTLTCPGVEPEDNATVHWVLRKPAAGSHPSRWAGMGRRLLLRSVQLHDSGNYSCYRAGRPAGTVHLLVDVPPEEPQLSCFRKSPLSNVVCEWGPRSTPSLTTKAVLLVRKFQNSPAEDFQEPCQYSQESQKFSCQLAVPEGDSSFYIVSMCVASSVGSKFSKTQTFQGCGILQPDPPANITVTAVARNPRWLSVTWQDPHSWNSSFYRLRFELRYRAERSKTFTTWMVKDLQHHCVIHDAWSGLRHVVQLRAQEEFGQGEWSEWSPEAMGTPWTESRSPPAENEVSTPMQALTTNKDDDNILFRDSANATSLPVQ

SEQ ID NO: 36 - protein, 15 aa, Artificial Sequence
  an artificially synthesized sequence
GLNDIFEAQKIEWHE

SEQ ID NO: 37 - protein, 358 aa, Artificial Sequence
  an artificially synthesized sequence
LAPRRCPAQEVARGVLTSLPGDSVTLTCPGVEPEDNATVHWVLRKPAAGSHPSRWAGMGRRLLLRSVQLHDSGNYSCYRAGRPAGTVHLLVDVPPEEPQLSCFRKSPLSNVVCEWGPRSTPSLTTKAVLLVRKFQNSPAEDFQEPCQYSQESQKFSCQLAVPEGDSSFYIVSMCVASSVGSKFSKTQTFQGCGILQPDPPANITVTAVARNPRWLSVTWQDPHSWNSSFYRLRFELRYRAERSKTFTTWMVKDLQHHCVIHDAWSGLRHVVQLRAQEEFGQGEWSEWSPEAMGTPWTESRSPPAENEVSTPMQALTTNKDDDNILFRDSANATSLPVQGGGGSGLNDIFEAQKIEWHE

SEQ ID NO: 38 - protein, 449 aa, Artificial Sequence
  an artificially synthesized sequence
EVQLVESGGGLVQPGGSLRLSCAASGSVFKINVMAWYRQAPGKGRELVAGIISGGSTSYADSVKGRFTISRDNAKNTLYLQMNSLRPEDTAVYYCAFITTESDYDLGRRYWGQGTLVTVSSASTKGPSVFPLAPSSKSTSGGTAALGCLVKDYFPEPVTVSWNSGALTSGVHTFPAVLQSSGLYSLSSVVTVPSSSLGTQTYICNVNHKPSNTKVDKKVEPKSCDKTHTCPPCPAPELLGGPSVFLFPPKPKDTLMISRTPEVTCVVVDVSHEDPEVKFNWYVDGVEVHNAKTKPREEQYNSTYRVVSVLTVLHQDWLNGKEYKCKVSNKALPAPIEKTISKAKGQPREPQVYTLPPSREEMTKNQVSLTCLVKGFYPSDIAVEWESNGQPENNYKTTPPVLDSDGSFFLYSKLTVDKSRWQQGNVFSCSVMHEALHNHYTQKSLSLSP

SEQ ID NO: 39 - protein, 449 aa, Artificial Sequence
  an artificially synthesized sequence
EVQLVESGGGLVQPGGSLRLSCAASGSVFKINVMAWVRQAPGKGLEWVAGIISGGSTSYADSVKGRFTISRDNAKNTLYLQMNSLRPEDTAVYYCAFITTESDYDLGRRYWGQGTLVTVSSASTKGPSVFPLAPSSKSTSGGTAALGCLVKDYFPEPVTVSWNSGALTSGVHTFPAVLQSSGLYSLSSVVTVPSSSLGTQTYICNVNHKPSNTKVDKKVEPKSCDKTHTCPPCPAPELLGGPSVFLFPPKPKDTLMISRTPEVTCVVVDVSHEDPEVKFNWYVDGVEVHNAKTKPREEQYNSTYRVVSVLTVLHQDWLNGKEYKCKVSNKALPAPIEKTISKAKGQPREPQVYTLPPSREEMTKNQVSLTCLVKGFYPSDIAVEWESNGQPENNYKTTPPVLDSDGSFFLYSKLTVDKSRWQQGNVFSCSVMHEALHNHYTQKSLSLSP

SEQ ID NO: 40 - protein, 457 aa, Artificial Sequence
  an artificially synthesized sequence
EVQLVESGGGLVQPGGSLRLSCAASGSVFKINVMAWYRQAPGKGRELVAGIISGGSTSYADSVKGRFTISRDNAKNTLYLQMNSLRPEDTAVYYCAFITTESDYDLGRRYWGQGTLVTVSSASLSGRSDNHTKGPSVFPLAPSSKSTSGGTAALGCLVKDYFPEPVTVSWNSGALTSGVHTFPAVLQSSGLYSLSSVVTVPSSSLGTQTYICNVNHKPSNTKVDKKVEPKSCDKTHTCPPCPAPELLGGPSVFLFPPKPKDTLMISRTPEVTCVVVDVSHEDPEVKFNWYVDGVEVHNAKTKPREEQYNSTYRVVSVLTVLHQDWLNGKEYKCKVSNKALPAPIEKTISKAKGQPREPQVYTLPPSREEMTKNQVSLTCLVKGFYPSDIAVEWESNGQPENNYKTTPPVLDSDGSFFLYSKLTVDKSRWQQGNVFSCSVMHEALHNHYTQKSLSLSP

SEQ ID NO: 41 - protein, 467 aa, Artificial Sequence
  an artificially synthesized sequence
EVQLVESGGGLVQPGGSLRLSCAASGSVFKINVMAWYRQAPGKGRELVAGIISGGSTSYADSVKGRFTISRDNAKNTLYLQMNSLRPEDTAVYYCAFITTESDYDLGRRYWGQGTLVTVSSASSGGSGLSGRSDNHGSSGGTKGPSVFPLAPSSKSTSGGTAALGCLVKDYFPEPVTVSWNSGALTSGVHTFPAVLQSSGLYSLSSVVTVPSSSLGTQTYICNVNHKPSNTKVDKKVEPKSCDKTHTCPPCPAPELLGGPSVFLFPPKPKDTLMISRTPEVTCVVVDVSHEDPEVKFNWYVDGVEVHNAKTKPREEQYNSTYRVVSVLTVLHQDWLNGKEYKCKVSNKALPAPIEKTISKAKGQPREPQVYTLPPSREEMTKNQVSLTCLVKGFYPSDIAVEWESNGQPENNYKTTPPVLDSDGSFFLYSKLTVDKSRWQQGNVFSCSVMHEALHNHYTQKSLSLSP

SEQ ID NO: 42 - protein, 467 aa, Artificial Sequence
  an artificially synthesized sequence
EVQLVESGGGLVQPGGSLRLSCAASGSVFKINVMAWYRQAPGKGRELVAGIISGGSTSYADSVKGRFTISRDNAKNTLYLQMNSLRPEDTAVYYCAFITTESDYDLGRRYWGQGTLVTVSGGSGLSGRSDNHGSSGGSSASTKGPSVFPLAPSSKSTSGGTAALGCLVKDYFPEPVTVSWNSGALTSGVHTFPAVLQSSGLYSLSSVVTVPSSSLGTQTYICNVNHKPSNTKVDKKVEPKSCDKTHTCPPCPAPELLGGPSVFLFPPKPKDTLMISRTPEVTCVVVDVSHEDPEVKFNWYVDGVEVHNAKTKPREEQYNSTYRVVSVLTVLHQDWLNGKEYKCKVSNKALPAPIEKTISKAKGQPREPQVYTLPPSREEMTKNQVSLTCLVKGFYPSDIAVEWESNGQPENNYKTTPPVLDSDGSFFLYSKLTVDKSRWQQGNVFSCSVMHEALHNHYTQKSLSLSP

SEQ ID NO: 43 - protein, 467 aa, Artificial Sequence
  an artificially synthesized sequence
EVQLVESGGGLVQPGGSLRLSCAASGSVFKINVMAWYRQAPGKGRELVAGIISGGSTSYADSVKGRFTISRDNAKNTLYLQMNSLRPEDTAVYYCAFITTESDYDLGRRYWGQGTLVTVSSASTKSGGSGLSGRSDNHGSSGGGPSVFPLAPSSKSTSGGTAALGCLVKDYFPEPVTVSWNSGALTSGVHTFPAVLQSSGLYSLSSVVTVPSSSLGTQTYICNVNHKPSNTKVDKKVEPKSCDKTHTCPPCPAPELLGGPSVFLFPPKPKDTLMISRTPEVTCVVVDVSHEDPEVKFNWYVDGVEVHNAKTKPREEQYNSTYRVVSVLTVLHQDWLNGKEYKCKVSNKALPAPIEKTISKAKGQPREPQVYTLPPSREEMTKNQVSLTCLVKGFYPSDIAVEWESNGQPENNYKTTPPVLDSDGSFFLYSKLTVDKSRWQQGNVFSCSVMHEALHNHYTQKSLSLSP

SEQ ID NO: 44 - protein, 18 aa, Artificial Sequence
  an artificially synthesized sequence
SGGSGLSGRSDNHGSSGG

SEQ ID NO: 45 - protein, 9 aa, Artificial Sequence
  an artificially synthesized sequence
LSGRSDNHG

SEQ ID NO: 46 - protein, 4 aa, Artificial Sequence
  an artificially synthesized sequence
GSGG

SEQ ID NO: 47 - protein, 4 aa, Artificial Sequence
  an artificially synthesized sequence
SGGG

SEQ ID NO: 48 - protein, 4 aa, Artificial Sequence
  an artificially synthesized sequence
GSSG

SEQ ID NO: 49 - protein, 5 aa, Artificial Sequence
  an artificially synthesized sequence
GGGGS

SEQ ID NO: 50 - protein, 6 aa, Artificial Sequence
  an artificially synthesized sequence
GGGGGS

SEQ ID NO: 51 - protein, 5 aa, Artificial Sequence
  an artificially synthesized sequence
SGGGG

SEQ ID NO: 52 - protein, 5 aa, Artificial Sequence
  an artificially synthesized sequence
GSSGG

SEQ ID NO: 53 - protein, 5 aa, Artificial Sequence
  an artificially synthesized sequence
SGGSG

SEQ ID NO: 54 - protein, 6 aa, Artificial Sequence
  an artificially synthesized sequence
SGGGGG

SEQ ID NO: 55 - protein, 7 aa, Artificial Sequence
  an artificially synthesized sequence
GGGGGGS

SEQ ID NO: 56 - protein, 7 aa, Artificial Sequence
  an artificially synthesized sequence
SGGGGGG

SEQ ID NO: 57 - protein, 641 aa, Human herpesvirus 4
MSDEGPGTGPGNGLGEKGDTSGPEGSGGSGPQRRGGDNHGRGRGRGRGRGGGRPGAPGGSGSGPRHRDGVRRPQKRPSCIGCKGTHGGTGAGAGAGGAGAGGAGAGGGAGAGGGAGGAGGAGGAGAGGGAGAGGGAGGAGGAGAGGGAGAGGGAGGAGAGGGAGGAGGAGAGGGAGAGGGAGGAGAGGGAGGAGGAGAGGGAGAGGAGGAGGAGAGGAGAGGGAGGAGGAGAGGAGAGGAGAGGAGAGGAGGAGAGGAGGAGAGGAGGAGAGGGAGGAGAGGGAGGAGAGGAGGAGAGGAGGAGAGGAGGAGAGGGAGAGGAGAGGGGRGRGGSGGRGRGGSGGRGRGGSGGRRGRGRERARGGSRERARGRGRGRGEKRPRSPSSQSSSSGSPPRRPPPGRRPFFHPVGEADYFEYHQEGGPDGEPDVPPGAIEQGPADDPGEGPSTGPRGQGDGGRRKKGGWFGKHRGQGGSNPKFENIAEGLRALLARSHVERTTDEGTWVAGVFVYGGSKTSLYNLRRGTALAIPQCRLTPLSRLPFGMAPGPGPQPGPLRESIVCYFMVFLQTHIFAEVLKDAIKDLVMTKPAPTCNIRVTVCSFDDGVDLPPWFPPMVEGAAAEGDDGDDGDEGGDGDEGEEGQE

SEQ ID NO: 58 - protein, 321 aa, Escherichia coli
MKDNTVPLKLIALLANGEFHSGEQLGETLGMSRAAINKHIQTLRDWGVDVFTVPGKGYSLPEPIQLLNAKQILGQLDGGSVAVLPVIDSTNQYLLDRIGELKSGDACIAEYQQAGRGRRGRKWFSPFGANLYLSMFWRLEQGPAAAIGLSLVIGIVMAEVLRKLGADKVRVKWPNDLYLQDRKLAGILVELTGKTGDAAQIVIGAGINMAMRRVEESVVNQGWITLQEAGINLDRNTLAAMLIRELRAALELFEQEGLAPYLSRWEKLDNFINRPVKLIIGDKEIFGISRGIDKQGALLLEQDGIIKPWMGGEISLRSAEK

SEQ ID NO: 59 - protein, 373 aa, Artificial Sequence
  an artificially synthesized sequence
QDGNEEMGGITQTPYKVSISGTTVILTCPQYPGSEILWQHNDKNIGGDEDDKNIGSDEDHLSLKEFSELEQSGYYVCYPRGSKPEDANFYLYLRARVCENCMEMDDIEGRMDPKSCDKTHTCPPCPAPELLGGPSVFLFPPKPKDTLMISRTPEVTCVVVDVSHEDPEVKFNWYVDGVEVHNAKTKPREEQYNSTYRVVSVLTVLHQDWLNGKEYKCKVSNKALPAPIEKTISKAKGQPREPQVCTLPPSRDELTKNQVSLWCLVKGFYPSDIAVEWESNGQPENNYKTTPPVLDSDGSFFLYSKLTVDKSRWQQGNVFSCSVMHEALHNHYTQKSLSLSPGGSGGSGENLYFQGSGGGLNDIFEAQKIEWHE

SEQ ID NO: 60 - protein, 323 aa, Artificial Sequence
  an artificially synthesized sequence
FKIPIEELEDRVFVNCNTSITWVEGTVGTLLSDITRLDLGKRILDPRGIYRCNGTDIYKDKESTVQVHYRMCQSCVELDDIEGRMDPKSCDKTHTCPPCPAPELLGGPSVFLFPPKPKDTLMISRTPEVTCVVVDVSHEDPEVKFNWYVDGVEVHNAKTKPREEQYNSTYRVVSVLTVLHQDWLNGKEYKCKVSNKALPAPIEKTISKAKGQPREPQVYTLPPSRCELTKNQVSLSCAVKGFYPSDIAVEWESNGQPENNYKTTPPVLDSDGSFFLVSKLTVDKSRWQQGNVFSCSVMHEALHNHYTQKSLSLSPDYKDDDDK

SEQ ID NO: 61 - protein, 123 aa, Vicugna pacos
QVQLVESGGGLVQPGGSLRLSCAASGFTFNHCWMYWVRQAPGKGLEWVSVINTDGGSAYYADSVKGRFTISRDNAKNTLYLQMNSLKSEDTAVYYCARDWAPLVDYYYGMDYWGKGTLVTVSG

SEQ ID NO: 62 - protein, 121 aa, Vicugna pacos
QVQLVESGGGLVQPGGSLRLSCAASGFPFDNYVMSWVRQAPGKGLEWISAISWNGGSTYYAESMKGRFTISRDNAKSTLYLQMNSLKSEDTAVYYCAKEPRVYYSGSPDYWGQGTQVTVSG

SEQ ID NO: 63 - protein, 118 aa, Vicugna pacos
QVQLVESGGGLVQPGGSLRLSCAASGFTFDVYGMSWVRHSPGKGLEWVSTINWNGGSTYYAESMKGRFTISRDNAKNTVYLQMNSLKPEDTAVYYCAKFAPWDGDMEWGQGTQVTVSG

SEQ ID NO: 64 - protein, 469 aa, Artificial Sequence
  an artificially synthesized sequence
QVQLVESGGGLVQPGGSLRLSCAASGFTFNHCWMYWVRQAPGKGLEWVSVINTDGGSAYYADSVKGRFTISRDNAKNTLYLQMNSLKSEDTAVYYCARDWAPLVDYYYGMDYWGKGTLVTVSGGSGLSGRSDNHGSSGGSSASTKGPSVFPLAPSSKSTSGGTAALGCLVKDYFPEPVTVSWNSGALTSGVHTFPAVLQSSGLYSLSSVVTVPSSSLGTQTYICNVNHKPSNTKVDKKVEPKSCDKTHTCPPCPAPELLGGPSVFLFPPKPKDTLMISRTPEVTCVVVDVSHEDPEVKFNWYVDGVEVHNAKTKPREEQYNSTYRVVSVLTVLHQDWLNGKEYKCKVSNKALPAPIEKTISKAKGQPREPQVYTLPPSREEMTKNQVSLTCLVKGFYPSDIAVEWESNGQPENNYKTTPPVLDSDGSFFLYSKLTVDKSRWQQGNVFSCSVMHEALHNHYTQKSLSLSP

SEQ ID NO: 65 - protein, 467 aa, Artificial Sequence
  an artificially synthesized sequence
QVQLVESGGGLVQPGGSLRLSCAASGFPFDNYVMSWVRQAPGKGLEWISAISWNGGSTYYAESMKGRFTISRDNAKSTLYLQMNSLKSEDTAVYYCAKEPRVYYSGSPDYWGQGTQVTVSGGSGLSGRSDNHGSSGGSSASTKGPSVFPLAPSSKSTSGGTAALGCLVKDYFPEPVTVSWNSGALTSGVHTFPAVLQSSGLYSLSSVVTVPSSSLGTQTYICNVNHKPSNTKVDKKVEPKSCDKTHTCPPCPAPELLGGPSVFLFPPKPKDTLMISRTPEVTCVVVDVSHEDPEVKFNWYVDGVEVHNAKTKPREEQYNSTYRVVSVLTVLHQDWLNGKEYKCKVSNKALPAPIEKTISKAKGQPREPQVYTLPPSREEMTKNQVSLTCLVKGFYPSDIAVEWESNGQPENNYKTTPPVLDSDGSFFLYSKLTVDKSRWQQGNVFSCSVMHEALHNHYTQKSLSLSP

SEQ ID NO: 66 - protein, 464 aa, Artificial Sequence
  an artificially synthesized sequence
QVQLVESGGGLVQPGGSLRLSCAASGFTFDVYGMSWVRHSPGKGLEWVSTINWNGGSTYYAESMKGRFTISRDNAKNTVYLQMNSLKPEDTAVYYCAKFAPWDGDMEWGQGTQVTVSGGSGLSGRSDNHGSSGGSSASTKGPSVFPLAPSSKSTSGGTAALGCLVKDYFPEPVTVSWNSGALTSGVHTFPAVLQSSGLYSLSSVVTVPSSSLGTQTYICNVNHKPSNTKVDKKVEPKSCDKTHTCPPCPAPELLGGPSVFLFPPKPKDTLMISRTPEVTCVVVDVSHEDPEVKFNWYVDGVEVHNAKTKPREEQYNSTYRVVSVLTVLHQDWLNGKEYKCKVSNKALPAPIEKTISKAKGQPREPQVYTLPPSREEMTKNQVSLTCLVKGFYPSDIAVEWESNGQPENNYKTTPPVLDSDGSFFLYSKLTVDKSRWQQGNVFSCSVMHEALHNHYTQKSLSLSP

SEQ ID NO: 67 - protein, 222 aa, Artificial Sequence
  an artificially synthesized sequence
DIQMTQSPSSLSASVGDRVTITCRASQSISSYLNWYQQKPGKAPKLLIYAASSLQSGVPSRFSGSGSGTDFTLTISSLQPEDFATYYCLQFDSYPLTFGGGTKVELSGRSDNHIKRTVAAPSVFIFPPSDEQLKSGTASVVCLLNNFYPREAKVQWKVDNALQSGNSQESVTEQDSKDSTYSLSSTLTLSKADYEKHKVYACEVTHQGLSSPVTKSFNRGEC

SEQ ID NO: 68 - protein, 222 aa, Artificial Sequence
  an artificially synthesized sequence
DIQMTQSPSSLSASVGDRVTITCRASQSISSYLNWYQQKPGKAPKLLIYAASSLQSGVPSRFSGSGSGTDFTLTISSLQPEDFATYYCLQFDSYPLTFGGGTKVEILSGRSDNHKRTVAAPSVFIFPPSDEQLKSGTASVVCLLNNFYPREAKVQWKVDNALQSGNSQESVTEQDSKDSTYSLSSTLTLSKADYEKHKVYACEVTHQGLSSPVTKSFNRGEC

SEQ ID NO: 69 - protein, 222 aa, Artificial Sequence
  an artificially synthesized sequence
DIQMTQSPSSLSASVGDRVTITCRASQSISSYLNWYQQKPGKAPKLLIYAASSLQSGVPSRFSGSGSGTDFTLTISSLQPEDFATYYCLQFDSYPLTFGGGTKVEIKLSGRSDNHRTVAAPSVFIFPPSDEQLKSGTASVVCLLNNFYPREAKVQWKVDNALQSGNSQESVTEQDSKDSTYSLSSTLTLSKADYEKHKVYACEVTHQGLSSPVTKSFNRGEC

SEQ ID NO: 70 - protein, 222 aa, Artificial Sequence
  an artificially synthesized sequence
DIQMTQSPSSLSASVGDRVTITCRASQSISSYLNWYQQKPGKAPKLLIYAASSLQSGVPSRFSGSGSGTDFTLTISSLQPEDFATYYCLQFDSYPLTFGGGTKVEIKRTLSGRSDNHVAAPSVFIFPPSDEQLKSGTASVVCLLNNFYPREAKVQWKVDNALQSGNSQESVTEQDSKDSTYSLSSTLTLSKADYEKHKVYACEVTHQGLSSPVTKSFNRGEC

SEQ ID NO: 71 - protein, 222 aa, Artificial Sequence
  an artificially synthesized sequence
DIQMTQSPSSLSASVGDRVTITCRASQSISSYLNWYQQKPGKAPKLLIYAASSLQSGVPSRFSGSGSGTDFTLTISSLQPEDFATYYCLQFDSYPLTFGGGTKVEIKRTVLSGRSDNHAAPSVFIFPPSDEQLKSGTASVVCLLNNFYPREAKVQWKVDNALQSGNSQESVTEQDSKDSTYSLSSTLTLSKADYEKHKVYACEVTHQGLSSPVTKSFNRGEC

SEQ ID NO: 72 - protein, 222 aa, Artificial Sequence
  an artificially synthesized sequence
DIQMTQSPSSLSASVGDRVTITCRASQSISSYLNWYQQKPGKAPKLLIYAASSLQSGVPSRFSGSGSGTDFTLTISSLQPEDFATYYCLQFDSYPLTFGGGTKVEIKRTVALSGRSDNHAPSVFIFPPSDEQLKSGTASVVCLLNNFYPREAKVQWKVDNALQSGNSQESVTEQDSKDSTYSLSSTLTLSKADYEKHKVYACEVTHQGLSSPVTKSFNRGEC

SEQ ID NO: 73 - protein, 222 aa, Artificial Sequence
  an artificially synthesized sequence
DIQMTQSPSSLSASVGDRVTITCRASQSISSYLNWYQQKPGKAPKLLIYAASSLQSGVPSRFSGSGSGTDFTLTISSLQPEDFATYYCLQFDSYPLTFGGGTKVEIKRTVAALSGRSDNHPSVFIFPPSDEQLKSGTASVVCLLNNFYPREAKVQWKVDNALQSGNSQESVTEQDSKDSTYSLSSTLTLSKADYEKHKVYACEVTHQGLSSPVTKSFNRGEC

SEQ ID NO: 74 - protein, 12 aa, Artificial Sequence
  an artificially synthesized sequence
TSTSGRSANPRG

SEQ ID NO: 75 - protein, 13 aa, Artificial Sequence
  an artificially synthesized sequence
ISSGLLSGRSDNH

SEQ ID NO: 76 - protein, 18 aa, Artificial Sequence
  an artificially synthesized sequence
AVGLLAPPGGLSGRSDNH

SEQ ID NO: 77 - protein, 13 aa, Artificial Sequence
  an artificially synthesized sequence
GAGVPMSMRGGAG

SEQ ID NO: 78 - protein, 13 aa, Artificial Sequence
  an artificially synthesized sequence
GAGIPVSLRSGAG

SEQ ID NO: 79 - protein, 8 aa, Artificial Sequence
  an artificially synthesized sequence
GPLGIAGQ

SEQ ID NO: 80 - protein, 10 aa, Artificial Sequence
  an artificially synthesized sequence
GGPLGMLSQS

SEQ ID NO: 81 - protein, 6 aa, Artificial Sequence
  an artificially synthesized sequence
PLGLWA

SEQ ID NO: 82 - protein, 13 aa, Artificial Sequence
  an artificially synthesized sequence
GAGRPFSMIMGAG

SEQ ID NO: 83 - protein, 13 aa, Artificial Sequence
  an artificially synthesized sequence
GAGVPLSLTMGAG

SEQ ID NO: 84 - protein, 13 aa, Artificial Sequence
  an artificially synthesized sequence
GAGVPLSLYSGAG

SEQ ID NO: 85 - protein, 6 aa, Artificial Sequence
  an artificially synthesized sequence
AANLRN

SEQ ID NO: 86 - protein, 6 aa, Artificial Sequence
  an artificially synthesized sequence
AQAYVK

SEQ ID NO: 87 - protein, 6 aa, Artificial Sequence
  an artificially synthesized sequence
AANYMR

SEQ ID NO: 88 - protein, 6 aa, Artificial Sequence
  an artificially synthesized sequence
AAALTR

SEQ ID NO: 89 - protein, 6 aa, Artificial Sequence
  an artificially synthesized sequence
AQNLMR

SEQ ID NO: 90 - protein, 6 aa, Artificial Sequence
  an artificially synthesized sequence
AANYTK

SEQ ID NO: 91 - protein, 16 aa, Artificial Sequence
  an artificially synthesized sequence
GAGPQGLAGQRGIVAG

SEQ ID NO: 92 - protein, 8 aa, Artificial Sequence
  an artificially synthesized sequence
PRFKIIGG

SEQ ID NO: 93 - protein, 8 aa, Artificial Sequence
  an artificially synthesized sequence
PRFRIIGG

SEQ ID NO: 94 - protein, 9 aa, Artificial Sequence
  an artificially synthesized sequence
GAGSGRSAG

SEQ ID NO: 95 - protein, 5 aa, Artificial Sequence
  an artificially synthesized sequence
SGRSA

SEQ ID NO: 96 - protein, 6 aa, Artificial Sequence
  an artificially synthesized sequence
GSGRSA

SEQ ID NO: 97 - protein, 5 aa, Artificial Sequence
  an artificially synthesized sequence
SGKSA

SEQ ID NO: 98 - protein, 5 aa, Artificial Sequence
  an artificially synthesized sequence
SGRSS

SEQ ID NO: 99 - protein, 5 aa, Artificial Sequence
  an artificially synthesized sequence
SGRRA

SEQ ID NO: 100 - protein, 5 aa, Artificial Sequence
  an artificially synthesized sequence
SGRNA

SEQ ID NO: 101 - protein, 5 aa, Artificial Sequence
  an artificially synthesized sequence
SGRKA

SEQ ID NO: 102 - protein, 6 aa, Artificial Sequence
  an artificially synthesized sequence
QRGRSA

SEQ ID NO: 103 - protein, 17 aa, Artificial Sequence
  an artificially synthesized sequence
GAGSLLKSRMVPNFNAG

SEQ ID NO: 104 - protein, 6 aa, Artificial Sequence
  an artificially synthesized sequence
TQGAAA

SEQ ID NO: 105 - protein, 6 aa, Artificial Sequence
  an artificially synthesized sequence
GAAAAA

SEQ ID NO: 106 - protein, 6 aa, Artificial Sequence
  an artificially synthesized sequence
GAGAAG

SEQ ID NO: 107 - protein, 6 aa, Artificial Sequence
  an artificially synthesized sequence
AAAAAG

SEQ ID NO: 108 - protein, 6 aa, Artificial Sequence
  an artificially synthesized sequence
LCGAAI

SEQ ID NO: 109 - protein, 6 aa, Artificial Sequence
  an artificially synthesized sequence
FAQALG

SEQ ID NO: 110 - protein, 6 aa, Artificial Sequence
  an artificially synthesized sequence
LLQANP

SEQ ID NO: 111 - protein, 6 aa, Artificial Sequence
  an artificially synthesized sequence
LAAANP

SEQ ID NO: 112 - protein, 6 aa, Artificial Sequence
  an artificially synthesized sequence
LYGAQF

SEQ ID NO: 113 - protein, 6 aa, Artificial Sequence
  an artificially synthesized sequence
LSQAQG

SEQ ID NO: 114 - protein, 6 aa, Artificial Sequence
  an artificially synthesized sequence
ASAASG

SEQ ID NO: 115 - protein, 6 aa, Artificial Sequence
  an artificially synthesized sequence
FLGASL

SEQ ID NO: 116 - protein, 6 aa, Artificial Sequence
  an artificially synthesized sequence
AYGATG

SEQ ID NO: 117 - protein, 6 aa, Artificial Sequence
  an artificially synthesized sequence
LAQATG

SEQ ID NO: 118 - protein, 17 aa, Artificial Sequence
  an artificially synthesized sequence
GAGSGVVIATVIVITAG

SEQ ID NO: 119 - protein, 8 aa, Artificial Sequence
  an artificially synthesized sequence
APMAEGGG

SEQ ID NO: 120 - protein, 8 aa, Artificial Sequence
  an artificially synthesized sequence
EAQGDKII

SEQ ID NO: 121 - protein, 8 aa, Artificial Sequence
  an artificially synthesized sequence
LAFSDAGP

SEQ ID NO: 122 - protein, 7 aa, Artificial Sequence
  an artificially synthesized sequence
YVADAPK

SEQ ID NO: 123 - protein, 5 aa, Artificial Sequence
  an artificially synthesized sequence
RRRRR

SEQ ID NO: 124 - protein, 6 aa, Artificial Sequence
  an artificially synthesized sequence
RRRRRR

SEQ ID NO: 125 - protein, 10 aa, Artificial Sequence
  an artificially synthesized sequence
GQSSRHRRAL

SEQ ID NO: 126 - protein, 9 aa, Artificial Sequence
  an artificially synthesized sequence
SSRHRRALD

SEQ ID NO: 127 - protein, 14 aa, Artificial Sequence
  an artificially synthesized sequence
RKSSIIIRMRDVVL

SEQ ID NO: 128 - protein, 15 aa, Artificial Sequence
  an artificially synthesized sequence
SSSFDKGKYKKGDDA

SEQ ID NO: 129 - protein, 15 aa, Artificial Sequence
  an artificially synthesized sequence
SSSFDKGKYKRGDDA

SEQ ID NO: 130 - protein, 4 aa, Artificial Sequence
  an artificially synthesized sequence
IEGR

SEQ ID NO: 131 - protein, 4 aa, Artificial Sequence
  an artificially synthesized sequence
IDGR

SEQ ID NO: 132 - protein, 7 aa, Artificial Sequence
  an artificially synthesized sequence
GGSIDGR

SEQ ID NO: 133 - protein, 8 aa, Artificial Sequence
  an artificially synthesized sequence
GPQGIAGQ

SEQ ID NO: 134 - protein, 8 aa, Artificial Sequence
  an artificially synthesized sequence
GPQGLLGA

SEQ ID NO: 135 - protein, 5 aa, Artificial Sequence
  an artificially synthesized sequence
GIAGQ

SEQ ID NO: 136 - protein, 7 aa, Artificial Sequence
  an artificially synthesized sequence
GPLGIAG

SEQ ID NO: 137 - protein, 8 aa, Artificial Sequence
  an artificially synthesized sequence
GPEGLRVG

SEQ ID NO: 138 - protein, 8 aa, Artificial Sequence
  an artificially synthesized sequence
YGAGLGVV

SEQ ID NO: 139 - protein, 8 aa, Artificial Sequence
  an artificially synthesized sequence
AGLGVVER

SEQ ID NO: 140 - protein, 8 aa, Artificial Sequence
  an artificially synthesized sequence
AGLGISST

SEQ ID NO: 141 - protein, 8 aa, Artificial Sequence
  an artificially synthesized sequence
EPQALAMS

SEQ ID NO: 142 - protein, 8 aa, Artificial Sequence
  an artificially synthesized sequence
QALAMSAI

SEQ ID NO: 143 - protein, 8 aa, Artificial Sequence
  an artificially synthesized sequence
AAYHLVSQ

SEQ ID NO: 144 - protein, 8 aa, Artificial Sequence
  an artificially synthesized sequence
MDAFLESS

SEQ ID NO: 145 - protein, 8 aa, Artificial Sequence
  an artificially synthesized sequence
ESLPVVAV

SEQ ID NO: 146 - protein, 8 aa, Artificial Sequence
  an artificially synthesized sequence
SAPAVESE

SEQ ID NO: 147 - protein, 8 aa, Artificial Sequence
  an artificially synthesized sequence
DVAQFVLT

SEQ ID NO: 148 - protein, 8 aa, Artificial Sequence
  an artificially synthesized sequence
VAQFVLTE

SEQ ID NO: 149 - protein, 8 aa, Artificial Sequence
  an artificially synthesized sequence
AQFVLTEG

SEQ ID NO: 150 - protein, 8 aa, Artificial Sequence
  an artificially synthesized sequence
PVQPIGPQ

SEQ ID NO: 151 - protein, 6 aa, Artificial Sequence
  an artificially synthesized sequence
LVPRGS

SEQ ID NO: 152 - protein, 214 aa, Artificial Sequence
  an artificially synthesized sequence
DIQMTQSPSSLSASVGDRVTITCRASQSISSYLNWYQQKPGKAPKLLIYAASSLQSGVPSRFSGSGSGTDFTLTISSLQPEDFATYYCLQFDSYPLTFGGGTKVEIKRTVAAPSVFIFPPSDEQLKSGTASVVCLLNNFYPREAKVQWKVDNALQSGNSQESVTEQDSKDSTYSLSSTLTLSKADYEKHKVYACEVTHQGLSSPVTKSFNRGEA

SEQ ID NO: 153 - protein, 107 aa, Artificial Sequence
  an artificially synthesized sequence
RTVAAPSVFIFPPSDEQLKSGTASVVCLLNNFYPREAKVQWKVDNALQSGNSQESVTEQDSKDSTYSLSSTLTLSKADYEKHKVYACEVTHQGLSSPVTKSFNRGEA

SEQ ID NO: 154 - protein, 464 aa, Artificial Sequence
  an artificially synthesized sequence
QLQLVESGGGLVQPGGSLRLSCTASGISFSISTMGWYRQAPGKQRELVATITSGGEAYYANSMKDRFTISRDNAENTVYLQMNRLKPEDSAVYYCNTKFPWSTDWDSRGQGTQVTVSGGSGLSGRSDNHGSSGGSSASTKGPSVFPLAPSSKSTSGGTAALGCLVKDYFPEPVTVSWNSGALTSGVHTFPAVLQSSGLYSLSSVVTVPSSSLGTQTYICNVNHKPSNTKVDKKVEPKSCDKTHTCPPCPAPELLGGPSVFLFPPKPKDTLMISRTPEVTCVVVDVSHEDPEVKFNWYVDGVEVHNAKTKPREEQYNSTYRVVSVLTVLHQDWLNGKEYKCKVSNKALPAPIEKTISKAKGQPREPQVYTLPPSREEMTKNQVSLTCLVKGFYPSDIAVEWESNGQPENNYKTTPPVLDSDGSFFLYSKLTVDKSRWQQGNVFSCSVMHEALHNHYTQKSLSLSP

SEQ ID NO: 155 - protein, 464 aa, Artificial Sequence
  an artificially synthesized sequence
QVQLVESGGGLVQPGGSLRLSCTASGISFSISTMGWYRQAPGKQRELVATITSGGEAYYANSMKDRFTISRDNAENTVYLQMNRLKPEDSAVYYCNTKFPWSTDWDSRGQGTQVTVSGGSGLSGRSDNHGSSGGSSASTKGPSVFPLAPSSKSTSGGTAALGCLVKDYFPEPVTVSWNSGALTSGVHTFPAVLQSSGLYSLSSVVTVPSSSLGTQTYICNVNHKPSNTKVDKKVEPKSCDKTHTCPPCPAPELLGGPSVFLFPPKPKDTLMISRTPEVTCVVVDVSHEDPEVKFNWYVDGVEVHNAKTKPREEQYNSTYRVVSVLTVLHQDWLNGKEYKCKVSNKALPAPIEKTISKAKGQPREPQVYTLPPSREEMTKNQVSLTCLVKGFYPSDIAVEWESNGQPENNYKTTPPVLDSDGSFFLYSKLTVDKSRWQQGNVFSCSVMHEALHNHYTQKSLSLSP

SEQ ID NO: 156 - protein, 464 aa, Artificial Sequence
  an artificially synthesized sequence
QVQLVESGGGLVQPGGSLRLSCTASGISFSISTMGWYRQAPGKQRELVATITSGGEAYYANSMKDRFTISRDNAENTVYLQMNRLKPEDSAVYYCNTKFPWSTDWNARGQGTQVTVSGGSGLSGRSDNHGSSGGSSASTKGPSVFPLAPSSKSTSGGTAALGCLVKDYFPEPVTVSWNSGALTSGVHTFPAVLQSSGLYSLSSVVTVPSSSLGTQTYICNVNHKPSNTKVDKKVEPKSCDKTHTCPPCPAPELLGGPSVFLFPPKPKDTLMISRTPEVTCVVVDVSHEDPEVKFNWYVDGVEVHNAKTKPREEQYNSTYRVVSVLTVLHQDWLNGKEYKCKVSNKALPAPIEKTISKAKGQPREPQVYTLPPSREEMTKNQVSLTCLVKGFYPSDIAVEWESNGQPENNYKTTPPVLDSDGSFFLYSKLTVDKSRWQQGNVFSCSVMHEALHNHYTQKSLSLSP

SEQ ID NO: 157 - protein, 464 aa, Artificial Sequence
  an artificially synthesized sequence
QLQLVESGGGLVQPGGSLRLSCTASGISFSISTMGWYRQAPGKQRELVATIASGGEAYYANSVKGRFTISRDNAENTVYLQMNRLKPEDSAVYYCNTKFPWSTDWNARGQGTQVTVSGGSGLSGRSDNHGSSGGSSASTKGPSVFPLAPSSKSTSGGTAALGCLVKDYFPEPVTVSWNSGALTSGVHTFPAVLQSSGLYSLSSVVTVPSSSLGTQTYICNVNHKPSNTKVDKKVEPKSCDKTHTCPPCPAPELLGGPSVFLFPPKPKDTLMISRTPEVTCVVVDVSHEDPEVKFNWYVDGVEVHNAKTKPREEQYNSTYRVVSVLTVLHQDWLNGKEYKCKVSNKALPAPIEKTISKAKGQPREPQVYTLPPSREEMTKNQVSLTCLVKGFYPSDIAVEWESNGQPENNYKTTPPVLDSDGSFFLYSKLTVDKSRWQQGNVFSCSVMHEALHNHYTQKSLSLSP

SEQ ID NO: 158 - protein, 464 aa, Artificial Sequence
  an artificially synthesized sequence
QLQLVESGGGLVQPGGSLRLSCTASGISFSISTMGWYRQAPGKQRELVATIASGGEAYYANSVKGRFTISREYAENTVFLQMNRLKPEDSAVYYCNTKFPWSTDWNARGQGTQVTVSGGSGLSGRSDNHGSSGGSSASTKGPSVFPLAPSSKSTSGGTAALGCLVKDYFPEPVTVSWNSGALTSGVHTFPAVLQSSGLYSLSSVVTVPSSSLGTQTYICNVNHKPSNTKVDKKVEPKSCDKTHTCPPCPAPELLGGPSVFLFPPKPKDTLMISRTPEVTCVVVDVSHEDPEVKFNWYVDGVEVHNAKTKPREEQYNSTYRVVSVLTVLHQDWLNGKEYKCKVSNKALPAPIEKTISKAKGQPREPQVYTLPPSREEMTKNQVSLTCLVKGFYPSDIAVEWESNGQPENNYKTTPPVLDSDGSFFLYSKLTVDKSRWQQGNVFSCSVMHEALHNHYTQKSLSLSP

SEQ ID NO: 159 - protein, 116 aa, Artificial Sequence
  an artificially synthesized sequence
QVQLVQSGGGLVQPGGSLRLSCAASYFDFDSYEMSWVRQAPGKGLEWIGSIYHSGSTYYNPSLKSRVTISRDNSKNTLYLQMNTLRAEDTATYYCARVNMDRFDYWGQGTLVTVSS

SEQ ID NO: 160 - protein, 124 aa, Artificial Sequence
  an artificially synthesized sequence
EVQLVESGGGPVQAGGSLRLSCAASGRTYRGYSMGWFRQAPGKEREFVAAIVWSGGNTYYEDSVKGRFTISRDNAKNTMYLQMTSLKPEDSATYYCAAKIRPYIFKIAGQYDYWGQGTLVTVSS

SEQ ID NO: 161 - protein, 354 aa, Artificial Sequence
  an artificially synthesized sequence
GSGLSGRSDNHGSSGGSSASTKGPSVFPLAPSSKSTSGGTAALGCLVKDYFPEPVTVSWNSGALTSGVHTFPAVLQSSGLYSLSSVVTVPSSSLGTQTYICNVNHKPSNTKVDKKVEPKSCDKTHTCPPCPAPELRGGPKVFLFPPKPKDTLMISRTPEVTCVVVDVSHEDPEVKFNWYVDGVEVHNAKTKPREEQYASTYRVVSVLTVLHQDWLNGKEYKCKVSNKALPAPIEKTISKAKGQPREPQVYTLPPSRCEMTKNQVSLSCAVKGFYPSDIAVEWESNGQPENNYKTTPPVLDSDGSFFLVSKLTVDKSRWQQGNVFSCSVMHEALHNHYTQKSLSLSPDYKDDDDK

SEQ ID NO: 162 - protein, 629 aa, Artificial Sequence
  an artificially synthesized sequence
QVQLVQSGGGLVQPGGSLRLSCAASYFDFDSYEMSWVRQAPGKGLEWIGSIYHSGSTYYNPSLKSRVTISRDNSKNTLYLQMNTLRAEDTATYYCARVNMDRFDYWGQGTLVTVSSGGGGSGGGGSGGGGSGGGGSGGGGSGGGGSGGGGSEVQLVESGGGPVQAGGSLRLSCAASGRTYRGYSMGWFRQAPGKEREFVAAIVWSGGNTYYEDSVKGRFTISRDNAKNTMYLQMTSLKPEDSATYYCAAKIRPYIFKIAGQYDYWGQGTLVTVSSGSGLSGRSDNHGSSGGSSASTKGPSVFPLAPSSKSTSGGTAALGCLVKDYFPEPVTVSWNSGALTSGVHTFPAVLQSSGLYSLSSVVTVPSSSLGTQTYICNVNHKPSNTKVDKKVEPKSCDKTHTCPPCPAPELRGGPKVFLFPPKPKDTLMISRTPEVTCVVVDVSHEDPEVKFNWYVDGVEVHNAKTKPREEQYASTYRVVSVLTVLHQDWLNGKEYKCKVSNKALPAPIEKTISKAKGQPREPQVYTLPPSRCEMTKNQVSLSCAVKGFYPSDIAVEWESNGQPENNYKTTPPVLDSDGSFFLVSKLTVDKSRWQQGNVFSCSVMHEALHNHYTQKSLSLSPDYKDDDDK

SEQ ID NO: 163 - protein, 118 aa, Artificial Sequence
  an artificially synthesized sequence
EVQLVESGGGLVQAGGSLRLSCAASGITFSINTMGWYRQAPGKQRELVALISSIGDTYYADSVKGRFTISRDNAKNTVYLQMNSLKPEDTAVYYCKRFRTAAQGTDYWGQGTLVTVSS

SEQ ID NO: 164 - protein, 631 aa, Artificial Sequence
  an artificially synthesized sequence
EVQLVESGGGLVQAGGSLRLSCAASGITFSINTMGWYRQAPGKQRELVALISSIGDTYYADSVKGRFTISRDNAKNTVYLQMNSLKPEDTAVYYCKRFRTAAQGTDYWGQGTLVTVSSGGGGSGGGGSGGGGSGGGGSGGGGSGGGGSGGGGSEVQLVESGGGPVQAGGSLRLSCAASGRTYRGYSMGWFRQAPGKEREFVAAIVWSGGNTYYEDSVKGRFTISRDNAKNTMYLQMTSLKPEDSATYYCAAKIRPYIFKIAGQYDYWGQGTLVTVSSGSGLSGRSDNHGSSGGSSASTKGPSVFPLAPSSKSTSGGTAALGCLVKDYFPEPVTVSWNSGALTSGVHTFPAVLQSSGLYSLSSVVTVPSSSLGTQTYICNVNHKPSNTKVDKKVEPKSCDKTHTCPPCPAPELRGGPKVFLFPPKPKDTLMISRTPEVTCVVVDVSHEDPEVKFNWYVDGVEVHNAKTKPREEQYASTYRVVSVLTVLHQDWLNGKEYKCKVSNKALPAPIEKTISKAKGQPREPQVYTLPPSRCEMTKNQVSLSCAVKGFYPSDIAVEWESNGQPENNYKTTPPVLDSDGSFFLVSKLTVDKSRWQQGNVFSCSVMHEALHNHYTQKSLSLSPDYKDDDDK

SEQ ID NO: 165 - protein, 468 aa, Artificial Sequence
  an artificially synthesized sequence
EVQLVESGGGLVQPGGSLRLSCAASGFTFDDYGMSWVRQAPGKALEWVSAISWNGNNTYYTESMKGRFTISRDNAKNTLYLQMNSLRPEDTAVYYCVKGSTAIVGVPPTYPDEYDYWGQGTLVTVSSAGAGIPVSLRSGAGSTKGPSVFPLAPSSKSTSGGTAALGCLVKDYFPEPVTVSWNSGALTSGVHTFPAVLQSSGLYSLSSVVTVPSSSLGTQTYICNVNHKPSNTKVDKKVEPKSCDKTHTCPPCPAPELLGGPSVFLFPPKPKDTLMISRTPEVTCVVVDVSHEDPEVKFNWYVDGVEVHNAKTKPREEQYNSTYRVVSVLTVLHQDWLNGKEYKCKVSNKALPAPIEKTISKAKGQPREPQVYTLPPSREEMTKNQVSLTCLVKGFYPSDIAVEWESNGQPENNYKTTPPVLDSDGSFFLYSKLTVDKSRWQQGNVFSCSVMHEALHNHYTQKSLSLSP

SEQ ID NO: 166 - protein, 230 aa, Artificial Sequence
  an artificially synthesized sequence
EPKSSDKTHTCPPCPAPELLGGPSVFLFPPKPKDTLMISRTPEVTCVVVDVSHEDPEVKFNWYVDGVEVHNAKTKPREEQYNSTYRVVSVLTVLHQDWLNGKEYKCKVSNKALPAPIEKTISKAKGQPREPQVCTLPPSRDELTKNQVSLWCLVKGFYPSDIAVEWESNGQPENNYKTTPPVLDSDGSFFLYSKLTVDKSRWQQGNVFSCSVMHEALHNHYTQKSLSLSP

SEQ ID NO: 167 - protein, 455 aa, Artificial Sequence
  an artificially synthesized sequence
EVQLVESGGGLVQPGGSLRLSCAASGFTFDDYGMSWVRQAPGKALEWVSAISWNGNNTYYTESMKGRFTISRDNAKNTLYLQMNSLRPEDTAVYYCVKGSTAIVGVPPTYPDEYDYWGQGTLVTVSSASTKGPSVFPLAPSSKSTSGGTAALGCLVKDYFPEPVTVSWNSGALTSGVHTFPAVLQSSGLYSLSSVVTVPSSSLGTQTYICNVNHKPSNTKVDKRVEPKSCDKTHTCPPCPAPELRRGPSVFLFPPKPKDTLMISRTPEVTCVVVDVSHEDPEVKFNWYVDGVEVHNAKTKPREEQYNSTYRVVSVLTVLHQDWLNGKEYKCKVSNKGLPSSIEKTISKAKGQPREPQVYTLPPSREEMTKNQVSLTCLVKGFYPSDIAVEWESNGQPENNYKTTPPVLDSDGSFFLYSKLTVDKSRWQEGNVFSCSVMHEALHNHYTQKSLSLSP

SEQ ID NO: 168-177 - skipped (10 entries)

SEQ ID NO: 178 - protein, 12 aa, Artificial Sequence
  an artificially synthesized sequence
TSTSGRSANPRG

SEQ ID NO: 179-188 - skipped (10 entries)

SEQ ID NO: 189 - protein, 467 aa, Artificial Sequence
  an artificially synthesized sequence
EVQLVESGGGLVQPGGSLRLSCAASGFTFDDYGMSWVRQAPGKALEWVSAISWNGNNTYYTESMKGRFTISRDNAKNTLYLQMNSLRPEDTAVYYCVKGSTAIVGVPPTYPDEYDYWGQGTLVTVSSTSTSGRSANPRGASTKGPSVFPLAPSSKSTSGGTAALGCLVKDYFPEPVTVSWNSGALTSGVHTFPAVLQSSGLYSLSSVVTVPSSSLGTQTYICNVNHKPSNTKVDKRVEPKSCDKTHTCPPCPAPELRRGPSVFLFPPKPKDTLMISRTPEVTCVVVDVSHEDPEVKFNWYVDGVEVHNAKTKPREEQYNSTYRVVSVLTVLHQDWLNGKEYKCKVSNKGLPSSIEKTISKAKGQPREPQVYTLPPSREEMTKNQVSLTCLVKGFYPSDIAVEWESNGQPENNYKTTPPVLDSDGSFFLYSKLTVDKSRWQEGNVFSCSVMHEALHNHYTQKSLSLSP

SEQ ID NO: 190 - protein, 127 aa, Artificial Sequence
  an artificially synthesized sequence
EVQLVESGGGLVQPGGSLRLSCAASGFTFSDYDIGWFRQAPGKGREGVSGISSSDGNTYYADSVKGRFTISRDNAKNTLYLQMNSLRPEDTAVYYCAAEPPDSSWYLDGSPEFFKYWGQGTLVTVSS

SEQ ID NO: 191 - protein, 455 aa, Artificial Sequence
  an artificially synthesized sequence
EVQLVESGGGLVQPGGSLRLSCAASGFTFSDYDIGWFRQAPGKGREGVSGISSSDGNTYYADSVKGRFTISRDNAKNTLYLQMNSLRPEDTAVYYCAAEPPDSSWYLDGSPEFFKYWGQGTLVTVSSASTKGPSVFPLAPSSKSTSGGTAALGCLVKDYFPEPVTVSWNSGALTSGVHTFPAVLQSSGLYSLSSVVTVPSSSLGTQTYICNVNHKPSNTKVDKKVEPKSCDKTHTCPPCPAPELLGGPSVFLFPPKPKDTLMISRTPEVTCVVVDVSHEDPEVKFNWYVDGVEVHNAKTKPREEQYNSTYRVVSVLTVLHQDWLNGKEYKCKVSNKALPAPIEKTISKAKGQPREPQVYTLPPSREEMTKNQVSLTCLVKGFYPSDIAVEWESNGQPENNYKTTPPVLDSDGSFFLYSKLTVDKSRWQQGNVFSCSVMHEALHNHYTQKSLSLSP

SEQ ID NO: 192 - protein, 455 aa, Artificial Sequence
  an artificially synthesized sequence
EVQLVESGGGLVQPGGSLRLSCAASGFTFSDYDIGWVRQAPGKGLEWVSGISSSDGNTYYADSVKGRFTISRDNAKNTLYLQMNSLRPEDTAVYYCAAEPPDSSWYLDGSPEFFKYWGQGTLVTVSSASTKGPSVFPLAPSSKSTSGGTAALGCLVKDYFPEPVTVSWNSGALTSGVHTFPAVLQSSGLYSLSSVVTVPSSSLGTQTYICNVNHKPSNTKVDKKVEPKSCDKTHTCPPCPAPELLGGPSVFLFPPKPKDTLMISRTPEVTCVVVDVSHEDPEVKFNWYVDGVEVHNAKTKPREEQYNSTYRVVSVLTVLHQDWLNGKEYKCKVSNKALPAPIEKTISKAKGQPREPQVYTLPPSREEMTKNQVSLTCLVKGFYPSDIAVEWESNGQPENNYKTTPPVLDSDGSFFLYSKLTVDKSRWQQGNVFSCSVMHEALHNHYTQKSLSLSP

SEQ ID NO: 193 - protein, 16 aa, Artificial Sequence
  an artificially synthesized sequence
GGGGSPLGLAGGGGGS

SEQ ID NO: 194 - protein, 18 aa, Artificial Sequence
  an artificially synthesized sequence
GGGGSGPLGIAGQGGGGS

SEQ ID NO: 195 - protein, 23 aa, Artificial Sequence
  an artificially synthesized sequence
GGGGSGAGVPLSLYSGAGGGGGS

SEQ ID NO: 196 - protein, 471 aa, Artificial Sequence
  an artificially synthesized sequence
EVQLVESGGGLVQPGGSLRLSCAASGFTFDDYGMSWVRQAPGKALEWVSAISWNGNNTYYTESMKGRFTISRDNAKNTLYLQMNSLRPEDTAVYYCVKGSTAIVGVPPTYPDEYDYWGQGTLVTVSSAGGGGSPLGLAGGGGGSSTKGPSVFPLAPSSKSTSGGTAALGCLVKDYFPEPVTVSWNSGALTSGVHTFPAVLQSSGLYSLSSVVTVPSSSLGTQTYICNVNHKPSNTKVDKKVEPKSCDKTHTCPPCPAPELLGGPSVFLFPPKPKDTLMISRTPEVTCVVVDVSHEDPEVKFNWYVDGVEVHNAKTKPREEQYNSTYRVVSVLTVLHQDWLNGKEYKCKVSNKALPAPIEKTISKAKGQPREPQVYTLPPSREEMTKNQVSLTCLVKGFYPSDIAVEWESNGQPENNYKTTPPVLDSDGSFFLYSKLTVDKSRWQQGNVFSCSVMHEALHNHYTQKSLSLSP

SEQ ID NO: 197 - protein, 473 aa, Artificial Sequence
  an artificially synthesized sequence
EVQLVESGGGLVQPGGSLRLSCAASGFTFDDYGMSWVRQAPGKALEWVSAISWNGNNTYYTESMKGRFTISRDNAKNTLYLQMNSLRPEDTAVYYCVKGSTAIVGVPPTYPDEYDYWGQGTLVTVSSAGGGGSGPLGIAGQGGGGSSTKGPSVFPLAPSSKSTSGGTAALGCLVKDYFPEPVTVSWNSGALTSGVHTFPAVLQSSGLYSLSSVVTVPSSSLGTQTYICNVNHKPSNTKVDKRVEPKSCDKTHTCPPCPAPELRRGPSVFLFPPKPKDTLMISRTPEVTCVVVDVSHEDPEVKFNWYVDGVEVHNAKTKPREEQYNSTYRVVSVLTVLHQDWLNGKEYKCKVSNKGLPSSIEKTISKAKGQPREPQVYTLPPSREEMTKNQVSLTCLVKGFYPSDIAVEWESNGQPENNYKTTPPVLDSDGSFFLYSKLTVDKSRWQEGNVFSCSVMHEALHNHYTQKSLSLSP

SEQ ID NO: 198 - protein, 478 aa, Artificial Sequence
  an artificially synthesized sequence
EVQLVESGGGLVQPGGSLRLSCAASGFTFDDYGMSWVRQAPGKALEWVSAISWNGNNTYYTESMKGRFTISRDNAKNTLYLQMNSLRPEDTAVYYCVKGSTAIVGVPPTYPDEYDYWGQGTLVTVSSAGGGGSGAGVPLSLYSGAGGGGGSSTKGPSVFPLAPSSKSTSGGTAALGCLVKDYFPEPVTVSWNSGALTSGVHTFPAVLQSSGLYSLSSVVTVPSSSLGTQTYICNVNHKPSNTKVDKKVEPKSCDKTHTCPPCPAPELLGGPSVFLFPPKPKDTLMISRTPEVTCVVVDVSHEDPEVKFNWYVDGVEVHNAKTKPREEQYNSTYRVVSVLTVLHQDWLNGKEYKCKVSNKALPAPIEKTISKAKGQPREPQVYTLPPSREEMTKNQVSLTCLVKGFYPSDIAVEWESNGQPENNYKTTPPVLDSDGSFFLYSKLTVDKSRWQQGNVFSCSVMHEALHNHYTQKSLSLSP

SEQ ID NO: 199 - protein, 8 aa, Artificial Sequence
  an artificially synthesized sequence
DYKDDDDK

SEQ ID NO: 200 - protein, 1267 aa, Artificial Sequence
  an artificially synthesized sequence
MWWRLWWLLLLLLLLWPMVWAEAGLPRAGGGSQPPFRTFSASDWGLTHLVVHEQTGEVYVGAVNRIYKLSGNLTLLRAHVTGPVEDNEKCYPPPSVQSCPHGLGSTDNVNKLLLLDYAANRLLACGSASQGICQFLRLDDLFKLGEPHHRKEHYLSSVQEAGSMAGVLIAGPPGQGQAKLFVGTPIDGKSEYFPTLSSRRLMANEEDADMFGFVYQDEFVSSQLKIPSDTLSKFPAFDIYYVYSFRSEQFVYYLTLQLDTQLTSPDAAGEHFFTSKIVRLCVDDPKFYSYVEFPIGCEQAGVEYRLVQDAYLSRPGRALAHQLGLAEDEDVLFTVFAQGQKNRVKPPKESALCLFTLRAIKEKIKERIQSCYRGEGKLSLPWLLNKELGCINSPLQIDDDFCGQDFNQPLGGTVTIEGTPLFVDKDDGLTAVAAYDYRGRTVVFAGTRSGRIRKILVDLSNPGGRPALAYESVVAQEGSPILRDLVLSPNHQYLYAMTEKQVTRVPVESCVQYTSCELCLGSRDPHCGWCVLHSICSRRDACERADEPQRFAADLLQCVQLTVQPRNVSVTMSQVPLVLQAWNVPDLSAGVNCSFEDFTESESVLEDGRIHCRSPSAREVAPITRGQGDQRVVKLYLKSKETGKKFASVDFVFYNCSVHQSCLSCVNGSFPCHWCKYRHVCTHNVADCAFLEGRVNVSEDCPQILPSTQIYVPVGVVKPITLAARNLPQPQSGQRGYECLFHIPGSPARVTALRFNSSSLQCQNSSYSYEGNDVSDLPVNLSVVWNGNFVIDNPQNIQAHLYKCPALRESCGLCLKADPRFECGWCVAERRCSLRHHCAADTPASWMHARHGSSRCTDPKILKLSPETGPRQGGTRLTITGENLGLRFEDVRLGVRVGKVLCSPVESEYISAEQIVCEIGDASSVRAHDALVEVCVRDCSPHYRALSPKRFTFVTPTFYRVSPSRGPLSGGTWIGIEGSHLNAGSDVAVSVGGRPCSFSWRNSREIRCLTPPGQSPGSAPIIININRAQLTNPEVKYNYTEDPTILRIDPEWSINSGGTLLTVTGTNLATVREPRIRAKYGGIERENGCLVYNDTTMVCRAPSVANPVRSPPELGERPDELGFVMDNVRSLLVLNSTSFLYYPDPVLEPLSPTGLLELKPSSPLILKGRNLLPPAPGNSRLNYTVLIGSTPCTLTVSETQLLCEAPNLTGQHKVTVRAGGFEFSPGTLQVYSDSLLTLPDYKDDDDKGGGGSGLNDIFEAQKIEWHE

SEQ ID NO: 201 - protein, 347 aa, Artificial Sequence
  an artificially synthesized sequence
MVLASSTTSIHTMLLLLLMLAQPAMAMKDNTVPLKLIALLANGEFHSGEQLGETLGMSRAAINKHIQTLRDWGVDVFTVPGKGYSLPEPIQLLNAKQILGQLDGGSVAVLPVIDSTNQYLLDRIGELKSGDACIAEYQQAGRGRRGRKWFSPFGANLYLSMFWRLEQGPAAAIGLSLVIGIVMAEVLRKLGADKVRVKWPNDLYLQDRKLAGILVELTGKTGDAAQIVIGAGINMAMRRVEESVVNQGWITLQEAGINLDRNTLAAMLIRELRAALELFEQEGLAPYLSRWEKLDNFINRPVKLIIGDKEIFGISRGIDKQGALLLEQDGIIKPWMGGEISLRSAEK

SEQ ID NO: 202 - protein, 463 aa, Artificial Sequence
  an artificially synthesized sequence
EVQLVESGGGLVQPGGSLRLSCAASGFTFDDYGMSWVRQAPGKALEWVSAISWNGNNTYYTESMKGRFTISRDNAKNTLYLQMNSLRPEDTAVYYCVKGSTAIVGVPPTYPDEYDYWGQGTLVTVSSAGPLGIAGQSTKGPSVFPLAPSSKSTSGGTAALGCLVKDYFPEPVTVSWNSGALTSGVHTFPAVLQSSGLYSLSSVVTVPSSSLGTQTYICNVNHKPSNTKVDKKVEPKSCDKTHTCPPCPAPELLGGPSVFLFPPKPKDTLMISRTPEVTCVVVDVSHEDPEVKFNWYVDGVEVHNAKTKPREEQYNSTYRVVSVLTVLHQDWLNGKEYKCKVSNKALPAPIEKTISKAKGQPREPQVYTLPPSREEMTKNQVSLTCLVKGFYPSDIAVEWESNGQPENNYKTTPPVLDSDGSFFLYSKLTVDKSRWQQGNVFSCSVMHEALHNHYTQKSLSLSP

SEQ ID NO: 203 - protein, 465 aa, Artificial Sequence
  an artificially synthesized sequence
EVQLVESGGGLVQPGGSLRLSCAASGFTFDDYGMSWVRQAPGKALEWVSAISWNGNNTYYTESMKGRFTISRDNAKNTLYLQMNSLRPEDTAVYYCVKGSTAIVGVPPTYPDEYDYWGQGTLVTVSSAGGPLGMLSQSSTKGPSVFPLAPSSKSTSGGTAALGCLVKDYFPEPVTVSWNSGALTSGVHTFPAVLQSSGLYSLSSVVTVPSSSLGTQTYICNVNHKPSNTKVDKKVEPKSCDKTHTCPPCPAPELLGGPSVFLFPPKPKDTLMISRTPEVTCVVVDVSHEDPEVKFNWYVDGVEVHNAKTKPREEQYNSTYRVVSVLTVLHQDWLNGKEYKCKVSNKALPAPIEKTISKAKGQPREPQVYTLPPSREEMTKNQVSLTCLVKGFYPSDIAVEWESNGQPENNYKTTPPVLDSDGSFFLYSKLTVDKSRWQQGNVFSCSVMHEALHNHYTQKSLSLSP

SEQ ID NO: 204 - protein, 461 aa, Artificial Sequence
  an artificially synthesized sequence
EVQLVESGGGLVQPGGSLRLSCAASGFTFDDYGMSWVRQAPGKALEWVSAISWNGNNTYYTESMKGRFTISRDNAKNTLYLQMNSLRPEDTAVYYCVKGSTAIVGVPPTYPDEYDYWGQGTLVTVSSAPLGLWASTKGPSVFPLAPSSKSTSGGTAALGCLVKDYFPEPVTVSWNSGALTSGVHTFPAVLQSSGLYSLSSVVTVPSSSLGTQTYICNVNHKPSNTKVDKKVEPKSCDKTHTCPPCPAPELLGGPSVFLFPPKPKDTLMISRTPEVTCVVVDVSHEDPEVKFNWYVDGVEVHNAKTKPREEQYNSTYRVVSVLTVLHQDWLNGKEYKCKVSNKALPAPIEKTISKAKGQPREPQVYTLPPSREEMTKNQVSLTCLVKGFYPSDIAVEWESNGQPENNYKTTPPVLDSDGSFFLYSKLTVDKSRWQQGNVFSCSVMHEALHNHYTQKSLSLSP

SEQ ID NO: 205 - protein, 463 aa, Artificial Sequence
  an artificially synthesized sequence
EVQLVESGGGLVQPGGSLRLSCAASGFTFDDYGMSWVRQAPGKALEWVSAISWNGNNTYYTESMKGRFTISRDNAKNTLYLQMNSLRPEDTAVYYCVKGSTAIVGVPPTYPDEYDYWGQGTLVTVSSAVPLSLTMGSTKGPSVFPLAPSSKSTSGGTAALGCLVKDYFPEPVTVSWNSGALTSGVHTFPAVLQSSGLYSLSSVVTVPSSSLGTQTYICNVNHKPSNTKVDKKVEPKSCDKTHTCPPCPAPELLGGPSVFLFPPKPKDTLMISRTPEVTCVVVDVSHEDPEVKFNWYVDGVEVHNAKTKPREEQYNSTYRVVSVLTVLHQDWLNGKEYKCKVSNKALPAPIEKTISKAKGQPREPQVYTLPPSREEMTKNQVSLTCLVKGFYPSDIAVEWESNGQPENNYKTTPPVLDSDGSFFLYSKLTVDKSRWQQGNVFSCSVMHEALHNHYTQKSLSLSP

SEQ ID NO: 206 - protein, 468 aa, Artificial Sequence
  an artificially synthesized sequence
EVQLVESGGGLVQPGGSLRLSCAASGFTFDDYGMSWVRQAPGKALEWVSAISWNGNNTYYTESMKGRFTISRDNAKNTLYLQMNSLRPEDTAVYYCVKGSTAIVGVPPTYPDEYDYWGQGTLVTVSSAGAGVPLSLTMGAGSTKGPSVFPLAPSSKSTSGGTAALGCLVKDYFPEPVTVSWNSGALTSGVHTFPAVLQSSGLYSLSSVVTVPSSSLGTQTYICNVNHKPSNTKVDKKVEPKSCDKTHTCPPCPAPELLGGPSVFLFPPKPKDTLMISRTPEVTCVVVDVSHEDPEVKFNWYVDGVEVHNAKTKPREEQYNSTYRVVSVLTVLHQDWLNGKEYKCKVSNKALPAPIEKTISKAKGQPREPQVYTLPPSREEMTKNQVSLTCLVKGFYPSDIAVEWESNGQPENNYKTTPPVLDSDGSFFLYSKLTVDKSRWQQGNVFSCSVMHEALHNHYTQKSLSLSP

SEQ ID NO: 207 - protein, 471 aa, Artificial Sequence
  an artificially synthesized sequence
EVQLVESGGGLVQPGGSLRLSCAASGFTFDDYGMSWVRQAPGKALEWVSAISWNGNNTYYTESMKGRFTISRDNAKNTLYLQMNSLRPEDTAVYYCVKGSTAIVGVPPTYPDEYDYWGQGTLVTVSSAGAGPQGLAGQRGIVAGSTKGPSVFPLAPSSKSTSGGTAALGCLVKDYFPEPVTVSWNSGALTSGVHTFPAVLQSSGLYSLSSVVTVPSSSLGTQTYICNVNHKPSNTKVDKKVEPKSCDKTHTCPPCPAPELLGGPSVFLFPPKPKDTLMISRTPEVTCVVVDVSHEDPEVKFNWYVDGVEVHNAKTKPREEQYNSTYRVVSVLTVLHQDWLNGKEYKCKVSNKALPAPIEKTISKAKGQPREPQVYTLPPSREEMTKNQVSLTCLVKGFYPSDIAVEWESNGQPENNYKTTPPVLDSDGSFFLYSKLTVDKSRWQQGNVFSCSVMHEALHNHYTQKSLSLSP

SEQ ID NO: 208 - protein, 447 aa, Artificial Sequence
  an artificially synthesized sequence
QVQLQESGPGLVRPSQTLSLTCTVSGYSITSDHAWSWVRQPPGRGLEWIGYISYSGITTYNPSLKSRVTMLRDTSKNQFSLRLSSVTAADTAVYYCARSLARTTAMDYWGQGSLVTVSSASTKGPSVFPLAPSSKSTSGGTAALGCLVKDYFPEPVTVSWNSGALTSGVHTFPAVLQSSGLYSLSSVVTVPSSSLGTQTYICNVNHKPSNTKVDKRVEPKSCDKTHTCPPCPAPELRRGPSVFLFPPKPKDTLMISRTPEVTCVVVDVSHEDPEVKFNWYVDGVEVHNAKTKPREEQYNSTYRVVSVLTVLHQDWLNGKEYKCKVSNKGLPSSIEKTISKAKGQPREPQVYTLPPSREEMTKNQVSLTCLVKGFYPSDIAVEWESNGQPENNYKTTPPVLDSDGSFFLYSKLTVDKSRWQEGNVFSCSVMHEALHNHYTQKSLSLSP

SEQ ID NO: 209 - protein, 214 aa, Artificial Sequence [sequence omitted]

SEQ ID NO: 210 - protein, 12 aa, Artificial Sequence
  an artificially synthesized sequence
TSTSGRSANPRG

SEQ ID NO: 211 - protein, 119 aa, Artificial Sequence [sequence omitted]

SEQ ID NO: 212 - protein, 328 aa, Artificial Sequence
  an artificially synthesized sequence
ASTKGPSVFPLAPSSKSTSGGTAALGCLVKDYFPEPVTVSWNSGALTSGVHTFPAVLQSSGLYSLSSVVTVPSSSLGTQTYICNVNHKPSNTKVDKRVEPKSCDKTHTCPPCPAPELRRGPSVFLFPPKPKDTLMISRTPEVTCVVVDVSHEDPEVKFNWYVDGVEVHNAKTKPREEQYNSTYRVVSVLTVLHQDWLNGKEYKCKVSNKGLPSSIEKTISKAKGQPREPQVYTLPPSREEMTKNQVSLTCLVKGFYPSDIAVEWESNGQPENNYKTTPPVLDSDGSFFLYSKLTVDKSRWQEGNVFSCSVMHEALHNHYTQKSLSLSP

SEQ ID NO: 213 - protein, 131 aa, Artificial Sequence
  an artificially synthesized sequence
QVQLQESTSTSGRSANPRGGPGLVRPSQTLSLTCTVSGYSITSDHAWSWVRQPPGRGLEWIGYISYSGITTYNPSLKSRVTMLRDTSKNQFSLRLSSVTAADTAVYYCARSLARTTAMDYWGQGSLVTVSS

SEQ ID NO: 214 - protein, 131 aa, Artificial Sequence
  an artificially synthesized sequence
QVQLQESGTSTSGRSANPRGPGLVRPSQTLSLTCTVSGYSITSDHAWSWVRQPPGRGLEWIGYISYSGITTYNPSLKSRVTMLRDTSKNQFSLRLSSVTAADTAVYYCARSLARTTAMDYWGQGSLVTVSS

SEQ ID NO: 215 - protein, 131 aa, Artificial Sequence
  an artificially synthesized sequence
QVQLQESGPTSTSGRSANPRGGLVRPSQTLSLTCTVSGYSITSDHAWSWVRQPPGRGLEWIGYISYSGITTYNPSLKSRVTMLRDTSKNQFSLRLSSVTAADTAVYYCARSLARTTAMDYWGQGSLVTVSS

SEQ ID NO: 216 - protein, 131 aa, Artificial Sequence
  an artificially synthesized sequence
QVQLQESGPGTSTSGRSANPRGLVRPSQTLSLTCTVSGYSITSDHAWSWVRQPPGRGLEWIGYISYSGITTYNPSLKSRVTMLRDTSKNQFSLRLSSVTAADTAVYYCARSLARTTAMDYWGQGSLVTVSS

SEQ ID NO: 217 - protein, 131 aa, Artificial Sequence
  an artificially synthesized sequence
QVQLQESGPGLTSTSGRSANPRGVRPSQTLSLTCTVSGYSITSDHAWSWVRQPPGRGLEWIGYISYSGITTYNPSLKSRVTMLRDTSKNQFSLRLSSVTAADTAVYYCARSLARTTAMDYWGQGSLVTVSS

SEQ ID NO: 218 - protein, 131 aa, Artificial Sequence
  an artificially synthesized sequence
QVQLQESGPGLVTSTSGRSANPRGRPSQTLSLTCTVSGYSITSDHAWSWVRQPPGRGLEWIGYISYSGITTYNPSLKSRVTMLRDTSKNQFSLRLSSVTAADTAVYYCARSLARTTAMDYWGQGSLVTVSS

SEQ ID NO: 219 - protein, 131 aa, Artificial Sequence
  an artificially synthesized sequence
QVQLQESGPGLVRTSTSGRSANPRGPSQTLSLTCTVSGYSITSDHAWSWVRQPPGRGLEWIGYISYSGITTYNPSLKSRVTMLRDTSKNQFSLRLSSVTAADTAVYYCARSLARTTAMDYWGQGSLVTVSS

SEQ ID NO: 220 - protein, 131 aa, Artificial Sequence
  an artificially synthesized sequence
QVQLQESGPGLVRPTSTSGRSANPRGSQTLSLTCTVSGYSITSDHAWSWVRQPPGRGLEWIGYISYSGITTYNPSLKSRVTMLRDTSKNQFSLRLSSVTAADTAVYYCARSLARTTAMDYWGQGSLVTVSS

SEQ ID NO: 221 - protein, 131 aa, Artificial Sequence
  an artificially synthesized sequence
QVQLQESGPGLVRPSTSTSGRSANPRGQTLSLTCTVSGYSITSDHAWSWVRQPPGRGLEWIGYISYSGITTYNPSLKSRVTMLRDTSKNQFSLRLSSVTAADTAVYYCARSLARTTAMDYWGQGSLVTVSS

SEQ ID NO: 222 - protein, 131 aa, Artificial Sequence
  an artificially synthesized sequence
QVQLQESGPGLVRPSQTLSLTCTVSGYSITSDHAWSWVRQPTSTSGRSANPRGPGRGLEWIGYISYSGITTYNPSLKSRVTMLRDTSKNQFSLRLSSVTAADTAVYYCARSLARTTAMDYWGQGSLVTVSS

SEQ ID NO: 223 - protein, 131 aa, Artificial Sequence
  an artificially synthesized sequence
QVQLQESGPGLVRPSQTLSLTCTVSGYSITSDHAWSWVRQPPTSTSGRSANPRGGRGLEWIGYISYSGITTYNPSLKSRVTMLRDTSKNQFSLRLSSVTAADTAVYYCARSLARTTAMDYWGQGSLVTVSS

SEQ ID NO: 224 - protein, 131 aa, Artificial Sequence
  an artificially synthesized sequence
QVQLQESGPGLVRPSQTLSLTCTVSGYSITSDHAWSWVRQPPGTSTSGRSANPRGRGLEWIGYISYSGITTYNPSLKSRVTMLRDTSKNQFSLRLSSVTAADTAVYYCARSLARTTAMDYWGQGSLVTVSS

SEQ ID NO: 225 - protein, 131 aa, Artificial Sequence
  an artificially synthesized sequence
QVQLQESGPGLVRPSQTLSLTCTVSGYSITSDHAWSWVRQPPGRTSTSGRSANPRGGLEWIGYISYSGITTYNPSLKSRVTMLRDTSKNQFSLRLSSVTAADTAVYYCARSLARTTAMDYWGQGSLVTVSS

SEQ ID NO: 226 - protein, 131 aa, Artificial Sequence
  an artificially synthesized sequence
QVQLQESGPGLVRPSQTLSLTCTVSGYSITSDHAWSWVRQPPGRGTSTSGRSANPRGLEWIGYISYSGITTYNPSLKSRVTMLRDTSKNQFSLRLSSVTAADTAVYYCARSLARTTAMDYWGQGSLVTVSS

SEQ ID NO: 227 - protein, 131 aa, Artificial Sequence
  an artificially synthesized sequence
QVQLQESGPGLVRPSQTLSLTCTVSGYSITSDHAWSWVRQPPGRGLTSTSGRSANPRGEWIGYISYSGITTYNPSLKSRVTMLRDTSKNQFSLRLSSVTAADTAVYYCARSLARTTAMDYWGQGSLVTVSS

SEQ ID NO: 228 - protein, 131 aa, Artificial Sequence
  an artificially synthesized sequence
QVQLQESGPGLVRPSQTLSLTCTVSGYSITSDHAWSWVRQPPGRGLEWIGYISYSGTSTSGRSANPRGITTYNPSLKSRVTMLRDTSKNQFSLRLSSVTAADTAVYYCARSLARTTAMDYWGQGSLVTVSS

SEQ ID NO: 229 - protein, 131 aa, Artificial Sequence
  an artificially synthesized sequence
QVQLQESGPGLVRPSQTLSLTCTVSGYSITSDHAWSWVRQPPGRGLEWIGYISYSGITSTSGRSANPRGTTYNPSLKSRVTMLRDTSKNQFSLRLSSVTAADTAVYYCARSLARTTAMDYWGQGSLVTVSS

SEQ ID NO: 230 - protein, 131 aa, Artificial Sequence
  an artificially synthesized sequence
QVQLQESGPGLVRPSQTLSLTCTVSGYSITSDHAWSWVRQPPGRGLEWIGYISYSGITTSTSGRSANPRGTYNPSLKSRVTMLRDTSKNQFSLRLSSVTAADTAVYYCARSLARTTAMDYWGQGSLVTVSS

SEQ ID NO: 231 - protein, 131 aa, Artificial Sequence
  an artificially synthesized sequence
QVQLQESGPGLVRPSQTLSLTCTVSGYSITSDHAWSWVRQPPGRGLEWIGYISYSGITTTSTSGRSANPRGYNPSLKSRVTMLRDTSKNQFSLRLSSVTAADTAVYYCARSLARTTAMDYWGQGSLVTVSS

SEQ ID NO: 232 - protein, 131 aa, Artificial Sequence
  an artificially synthesized sequence
QVQLQESGPGLVRPSQTLSLTCTVSGYSITSDHAWSWVRQPPGRGLEWIGYISYSGITTYTSTSGRSANPRGNPSLKSRVTMLRDTSKNQFSLRLSSVTAADTAVYYCARSLARTTAMDYWGQGSLVTVSS

SEQ ID NO: 233 - protein, 131 aa, Artificial Sequence
  an artificially synthesized sequence
QVQLQESGPGLVRPSQTLSLTCTVSGYSITSDHAWSWVRQPPGRGLEWIGYISYSGITTYNTSTSGRSANPRGPSLKSRVTMLRDTSKNQFSLRLSSVTAADTAVYYCARSLARTTAMDYWGQGSLVTVSS

SEQ ID NO: 234 - protein, 131 aa, Artificial Sequence
  an artificially synthesized sequence
QVQLQESGPGLVRPSQTLSLTCTVSGYSITSDHAWSWVRQPPGRGLEWIGYISYSGITTYNPTSTSGRSANPRGSLKSRVTMLRDTSKNQFSLRLSSVTAADTAVYYCARSLARTTAMDYWGQGSLVTVSS

SEQ ID NO: 235 - protein, 131 aa, Artificial Sequence
  an artificially synthesized sequence
QVQLQESGPGLVRPSQTLSLTCTVSGYSITSDHAWSWVRQPPGRGLEWIGYISYSGITTYNPSTSTSGRSANPRGLKSRVTMLRDTSKNQFSLRLSSVTAADTAVYYCARSLARTTAMDYWGQGSLVTVSS

SEQ ID NO: 236 - protein, 131 aa, Artificial Sequence
  an artificially synthesized sequence
QVQLQESGPGLVRPSQTLSLTCTVSGYSITSDHAWSWVRQPPGRGLEWIGYISYSGITTYNPSLTSTSGRSANPRGKSRVTMLRDTSKNQFSLRLSSVTAADTAVYYCARSLARTTAMDYWGQGSLVTVSS

SEQ ID NO: 237 - protein, 131 aa, Artificial Sequence
  an artificially synthesized sequence
QVQLQESGPGLVRPSQTLSLTCTVSGYSITSDHAWSWVRQPPGRGLEWIGYISYSGITTYNPSLKTSTSGRSANPRGSRVTMLRDTSKNQFSLRLSSVTAADTAVYYCARSLARTTAMDYWGQGSLVTVSS

SEQ ID NO: 238 - protein, 131 aa, Artificial Sequence
  an artificially synthesized sequence
QVQLQESGPGLVRPSQTLSLTCTVSGYSITSDHAWSWVRQPPGRGLEWIGYISYSGITTYNPSLKSTSTSGRSANPRGRVTMLRDTSKNQFSLRLSSVTAADTAVYYCARSLARTTAMDYWGQGSLVTVSS

SEQ ID NO: 239 - protein, 131 aa, Artificial Sequence
  an artificially synthesized sequence
QVQLQESGPGLVRPSQTLSLTCTVSGYSITSDHAWSWVRQPPGRGLEWIGYISYSGITTYNPSLKSRTSTSGRSANPRGVTMLRDTSKNQFSLRLSSVTAADTAVYYCARSLARTTAMDYWGQGSLVTVSS

SEQ ID NO: 240 - protein, 131 aa, Artificial Sequence
  an artificially synthesized sequence
QVQLQESGPGLVRPSQTLSLTCTVSGYSITSDHAWSWVRQPPGRGLEWIGYISYSGITTYNPSLKSRVTSTSGRSANPRGTMLRDTSKNQFSLRLSSVTAADTAVYYCARSLARTTAMDYWGQGSLVTVSS

SEQ ID NO: 241 - protein, 131 aa, Artificial Sequence
  an artificially synthesized sequence
QVQLQESGPGLVRPSQTLSLTCTVSGYSITSDHAWSWVRQPPGRGLEWIGYISYSGITTYNPSLKSRVTTSTSGRSANPRGMLRDTSKNQFSLRLSSVTAADTAVYYCARSLARTTAMDYWGQGSLVTVSS

SEQ ID NO: 242 - protein, 131 aa, Artificial Sequence
  an artificially synthesized sequence
QVQLQESGPGLVRPSQTLSLTCTVSGYSITSDHAWSWVRQPPGRGLEWIGYISYSGITTYNPSLKSRVTMLRDTTSTSGRSANPRGSKNQFSLRLSSVTAADTAVYYCARSLARTTAMDYWGQGSLVTVSS

SEQ ID NO: 243 - protein, 131 aa, Artificial Sequence
  an artificially synthesized sequence
QVQLQESGPGLVRPSQTLSLTCTVSGYSITSDHAWSWVRQPPGRGLEWIGYISYSGITTYNPSLKSRVTMLRDTSTSTSGRSANPRGKNQFSLRLSSVTAADTAVYYCARSLARTTAMDYWGQGSLVTVSS

SEQ ID NO: 244 - protein, 131 aa, Artificial Sequence
  an artificially synthesized sequence
QVQLQESGPGLVRPSQTLSLTCTVSGYSITSDHAWSWVRQPPGRGLEWIGYISYSGITTYNPSLKSRVTMLRDTSKTSTSGRSANPRGNQFSLRLSSVTAADTAVYYCARSLARTTAMDYWGQGSLVTVSS

SEQ ID NO: 245 - protein, 131 aa, Artificial Sequence
  an artificially synthesized sequence
QVQLQESGPGLVRPSQTLSLTCTVSGYSITSDHAWSWVRQPPGRGLEWIGYISYSGITTYNPSLKSRVTMLRDTSKNTSTSGRSANPRGQFSLRLSSVTAADTAVYYCARSLARTTAMDYWGQGSLVTVSS

SEQ ID NO: 246 - protein, 131 aa, Artificial Sequence
  an artificially synthesized sequence
QVQLQESGPGLVRPSQTLSLTCTVSGYSITSDHAWSWVRQPPGRGLEWIGYISYSGITTYNPSLKSRVTMLRDTSKNQTSTSGRSANPRGFSLRLSSVTAADTAVYYCARSLARTTAMDYWGQGSLVTVSS

SEQ ID NO: 247 - protein, 131 aa, Artificial Sequence
  an artificially synthesized sequence
QVQLQESGPGLVRPSQTLSLTCTVSGYSITSDHAWSWVRQPPGRGLEWIGYISYSGITTYNPSLKSRVTMLRDTSKNQFSLRLSSVTTSTSGRSANPRGAADTAVYYCARSLARTTAMDYWGQGSLVTVSS

SEQ ID NO: 248 - protein, 131 aa, Artificial Sequence
  an artificially synthesized sequence
QVQLQESGPGLVRPSQTLSLTCTVSGYSITSDHAWSWVRQPPGRGLEWIGYISYSGITTYNPSLKSRVTMLRDTSKNQFSLRLSSVTATSTSGRSANPRGADTAVYYCARSLARTTAMDYWGQGSLVTVSS

SEQ ID NO: 249 - protein, 131 aa, Artificial Sequence
  an artificially synthesized sequence
QVQLQESGPGLVRPSQTLSLTCTVSGYSITSDHAWSWVRQPPGRGLEWIGYISYSGITTYNPSLKSRVTMLRDTSKNQFSLRLSSVTAATSTSGRSANPRGDTAVYYCARSLARTTAMDYWGQGSLVTVSS

SEQ ID NO: 250 - protein, 131 aa, Artificial Sequence
  an artificially synthesized sequence
QVQLQESGPGLVRPSQTLSLTCTVSGYSITSDHAWSWVRQPPGRGLEWIGYISYSGITTYNPSLKSRVTMLRDTSKNQFSLRLSSVTAADTAVYYCARSTSTSGRSANPRGLARTTAMDYWGQGSLVTVSS

SEQ ID NO: 251 - protein, 131 aa, Artificial Sequence
  an artificially synthesized sequence
QVQLQESGPGLVRPSQTLSLTCTVSGYSITSDHAWSWVRQPPGRGLEWIGYISYSGITTYNPSLKSRVTMLRDTSKNQFSLRLSSVTAADTAVYYCARSLTSTSGRSANPRGARTTAMDYWGQGSLVTVSS

SEQ ID NO: 252 - protein, 131 aa, Artificial Sequence
  an artificially synthesized sequence
QVQLQESGPGLVRPSQTLSLTCTVSGYSITSDHAWSWVRQPPGRGLEWIGYISYSGITTYNPSLKSRVTMLRDTSKNQFSLRLSSVTAADTAVYYCARSLATSTSGRSANPRGRTTAMDYWGQGSLVTVSS

SEQ ID NO: 253 - protein, 131 aa, Artificial Sequence
  an artificially synthesized sequence
QVQLQESGPGLVRPSQTLSLTCTVSGYSITSDHAWSWVRQPPGRGLEWIGYISYSGITTYNPSLKSRVTMLRDTSKNQFSLRLSSVTAADTAVYYCARSLARTSTSGRSANPRGTTAMDYWGQGSLVTVSS

SEQ ID NO: 254 - protein, 131 aa, Artificial Sequence
  an artificially synthesized sequence
QVQLQESGPGLVRPSQTLSLTCTVSGYSITSDHAWSWVRQPPGRGLEWIGYISYSGITTYNPSLKSRVTMLRDTSKNQFSLRLSSVTAADTAVYYCARSLARTTAMDYWTSTSGRSANPRGGQGSLVTVSS

SEQ ID NO: 255 - protein, 131 aa, Artificial Sequence
  an artificially synthesized sequence
QVQLQESGPGLVRPSQTLSLTCTVSGYSITSDHAWSWVRQPPGRGLEWIGYISYSGITTYNPSLKSRVTMLRDTSKNQFSLRLSSVTAADTAVYYCARSLARTTAMDYWGTSTSGRSANPRGQGSLVTVSS

SEQ ID NO: 256 - protein, 131 aa, Artificial Sequence
  an artificially synthesized sequence
QVQLQESGPGLVRPSQTLSLTCTVSGYSITSDHAWSWVRQPPGRGLEWIGYISYSGITTYNPSLKSRVTMLRDTSKNQFSLRLSSVTAADTAVYYCARSLARTTAMDYWGQTSTSGRSANPRGGSLVTVSS

SEQ ID NO: 257 - protein, 131 aa, Artificial Sequence
  an artificially synthesized sequence
QVQLQESGPGLVRPSQTLSLTCTVSGYSITSDHAWSWVRQPPGRGLEWIGYISYSGITTYNPSLKSRVTMLRDTSKNQFSLRLSSVTAADTAVYYCARSLARTTAMDYWGQGTSTSGRSANPRGSLVTVSS

SEQ ID NO: 258 - protein, 131 aa, Artificial Sequence
  an artificially synthesized sequence
QVQLQESGPGLVRPSQTLSLTCTVSGYSITSDHAWSWVRQPPGRGLEWIGYISYSGITTYNPSLKSRVTMLRDTSKNQFSLRLSSVTAADTAVYYCARSLARTTAMDYWGQGSTSTSGRSANPRGLVTVSS

SEQ ID NO: 259 - protein, 131 aa, Artificial Sequence
  an artificially synthesized sequence
QVQLQESGPGLVRPSQTLSLTCTVSGYSITSDHAWSWVRQPPGRGLEWIGYISYSGITTYNPSLKSRVTMLRDTSKNQFSLRLSSVTAADTAVYYCARSLARTTAMDYWGQGSLTSTSGRSANPRGVTVSS

SEQ ID NO: 260 - protein, 131 aa, Artificial Sequence
  an artificially synthesized sequence
QVQLQESGPGLVRPSQTLSLTCTVSGYSITSDHAWSWVRQPPGRGLEWIGYISYSGITTYNPSLKSRVTMLRDTSKNQFSLRLSSVTAADTAVYYCARSLARTTAMDYWGQGSLVTSTSGRSANPRGTVSS

SEQ ID NO: 261 - protein, 131 aa, Artificial Sequence
  an artificially synthesized sequence
QVQLQESGPGLVRPSQTLSLTCTVSGYSITSDHAWSWVRQPPGRGLEWIGYISYSGITTYNPSLKSRVTMLRDTSKNQFSLRLSSVTAADTAVYYCARSLARTTAMDYWGQGSLVTTSTSGRSANPRGVSS

SEQ ID NO: 262 - protein, 131 aa, Artificial Sequence
  an artificially synthesized sequence
QVQLQESGPGLVRPSQTLSLTCTVSGYSITSDHAWSWVRQPPGRGLEWIGYISYSGITTYNPSLKSRVTMLRDTSKNQFSLRLSSVTAADTAVYYCARSLARTTAMDYWGQGSLVTVTSTSGRSANPRGSS

SEQ ID NO: 263 - protein, 131 aa, Artificial Sequence
  an artificially synthesized sequence
QVQLQESGPGLVRPSQTLSLTCTVSGYSITSDHAWSWVRQPPGRGLEWIGYISYSGITTYNPSLKSRVTMLRDTSKNQFSLRLSSVTAADTAVYYCARSLARTTAMDYWGQGSLVTVSTSTSGRSANPRGS

SEQ ID NO: 264 - protein, 131 aa, Artificial Sequence
  an artificially synthesized sequence
QVQLQESGPGLVRPSQTLSLTCTVSGYSITSDHAWSWVRQPPGRGLEWIGYISYSGITTYNPSLKSRVTMLRDTSKNQFSLRLSSVTAADTAVYYCARSLARTTAMDYWGQGSLVTVSSTSTSGRSANPRG

SEQ ID NO: 265 - protein, 340 aa, Artificial Sequence
  an artificially synthesized sequence
ATSTSGRSANPRGSTKGPSVFPLAPSSKSTSGGTAALGCLVKDYFPEPVTVSWNSGALTSGVHTFPAVLQSSGLYSLSSVVTVPSSSLGTQTYICNVNHKPSNTKVDKRVEPKSCDKTHTCPPCPAPELRRGPSVFLFPPKPKDTLMISRTPEVTCVVVDVSHEDPEVKFNWYVDGVEVHNAKTKPREEQYNSTYRVVSVLTVLHQDWLNGKEYKCKVSNKGLPSSIEKTISKAKGQPREPQVYTLPPSREEMTKNQVSLTCLVKGFYPSDIAVEWESNGQPENNYKTTPPVLDSDGSFFLYSKLTVDKSRWQEGNVFSCSVMHEALHNHYTQKSLSLSP

SEQ ID NO: 266 - protein, 340 aa, Artificial Sequence
  an artificially synthesized sequence
ASTSTSGRSANPRGTKGPSVFPLAPSSKSTSGGTAALGCLVKDYFPEPVTVSWNSGALTSGVHTFPAVLQSSGLYSLSSVVTVPSSSLGTQTYICNVNHKPSNTKVDKRVEPKSCDKTHTCPPCPAPELRRGPSVFLFPPKPKDTLMISRTPEVTCVVVDVSHEDPEVKFNWYVDGVEVHNAKTKPREEQYNSTYRVVSVLTVLHQDWLNGKEYKCKVSNKGLPSSIEKTISKAKGQPREPQVYTLPPSREEMTKNQVSLTCLVKGFYPSDIAVEWESNGQPENNYKTTPPVLDSDGSFFLYSKLTVDKSRWQEGNVFSCSVMHEALHNHYTQKSLSLSP

SEQ ID NO: 267 - protein, 340 aa, Artificial Sequence
  an artificially synthesized sequence
ASTTSTSGRSANPRGKGPSVFPLAPSSKSTSGGTAALGCLVKDYFPEPVTVSWNSGALTSGVHTFPAVLQSSGLYSLSSVVTVPSSSLGTQTYICNVNHKPSNTKVDKRVEPKSCDKTHTCPPCPAPELRRGPSVFLFPPKPKDTLMISRTPEVTCVVVDVSHEDPEVKFNWYVDGVEVHNAKTKPREEQYNSTYRVVSVLTVLHQDWLNGKEYKCKVSNKGLPSSIEKTISKAKGQPREPQVYTLPPSREEMTKNQVSLTCLVKGFYPSDIAVEWESNGQPENNYKTTPPVLDSDGSFFLYSKLTVDKSRWQEGNVFSCSVMHEALHNHYTQKSLSLSP

SEQ ID NO: 268 - protein, 340 aa, Artificial Sequence
  an artificially synthesized sequence
ASTKTSTSGRSANPRGGPSVFPLAPSSKSTSGGTAALGCLVKDYFPEPVTVSWNSGALTSGVHTFPAVLQSSGLYSLSSVVTVPSSSLGTQTYICNVNHKPSNTKVDKRVEPKSCDKTHTCPPCPAPELRRGPSVFLFPPKPKDTLMISRTPEVTCVVVDVSHEDPEVKFNWYVDGVEVHNAKTKPREEQYNSTYRVVSVLTVLHQDWLNGKEYKCKVSNKGLPSSIEKTISKAKGQPREPQVYTLPPSREEMTKNQVSLTCLVKGFYPSDIAVEWESNGQPENNYKTTPPVLDSDGSFFLYSKLTVDKSRWQEGNVFSCSVMHEALHNHYTQKSLSLSP

SEQ ID NO: 269 - protein, 340 aa, Artificial Sequence
  an artificially synthesized sequence
ASTKGTSTSGRSANPRGPSVFPLAPSSKSTSGGTAALGCLVKDYFPEPVTVSWNSGALTSGVHTFPAVLQSSGLYSLSSVVTVPSSSLGTQTYICNVNHKPSNTKVDKRVEPKSCDKTHTCPPCPAPELRRGPSVFLFPPKPKDTLMISRTPEVTCVVVDVSHEDPEVKFNWYVDGVEVHNAKTKPREEQYNSTYRVVSVLTVLHQDWLNGKEYKCKVSNKGLPSSIEKTISKAKGQPREPQVYTLPPSREEMTKNQVSLTCLVKGFYPSDIAVEWESNGQPENNYKTTPPVLDSDGSFFLYSKLTVDKSRWQEGNVFSCSVMHEALHNHYTQKSLSLSP

SEQ ID NO: 270 - protein, 340 aa, Artificial Sequence
  an artificially synthesized sequence
ASTKGPTSTSGRSANPRGSVFPLAPSSKSTSGGTAALGCLVKDYFPEPVTVSWNSGALTSGVHTFPAVLQSSGLYSLSSVVTVPSSSLGTQTYICNVNHKPSNTKVDKRVEPKSCDKTHTCPPCPAPELRRGPSVFLFPPKPKDTLMISRTPEVTCVVVDVSHEDPEVKFNWYVDGVEVHNAKTKPREEQYNSTYRVVSVLTVLHQDWLNGKEYKCKVSNKGLPSSIEKTISKAKGQPREPQVYTLPPSREEMTKNQVSLTCLVKGFYPSDIAVEWESNGQPENNYKTTPPVLDSDGSFFLYSKLTVDKSRWQEGNVFSCSVMHEALHNHYTQKSLSLSP

SEQ ID NO: 271 - protein, 340 aa, Artificial Sequence
  an artificially synthesized sequence
ASTKGPSTSTSGRSANPRGVFPLAPSSKSTSGGTAALGCLVKDYFPEPVTVSWNSGALTSGVHTFPAVLQSSGLYSLSSVVTVPSSSLGTQTYICNVNHKPSNTKVDKRVEPKSCDKTHTCPPCPAPELRRGPSVFLFPPKPKDTLMISRTPEVTCVVVDVSHEDPEVKFNWYVDGVEVHNAKTKPREEQYNSTYRVVSVLTVLHQDWLNGKEYKCKVSNKGLPSSIEKTISKAKGQPREPQVYTLPPSREEMTKNQVSLTCLVKGFYPSDIAVEWESNGQPENNYKTTPPVLDSDGSFFLYSKLTVDKSRWQEGNVFSCSVMHEALHNHYTQKSLSLSP

SEQ ID NO: 272 - protein, 340 aa, Artificial Sequence
  an artificially synthesized sequence
ASTKGPSVFPLATSTSGRSANPRGPSSKSTSGGTAALGCLVKDYFPEPVTVSWNSGALTSGVHTFPAVLQSSGLYSLSSVVTVPSSSLGTQTYICNVNHKPSNTKVDKRVEPKSCDKTHTCPPCPAPELRRGPSVFLFPPKPKDTLMISRTPEVTCVVVDVSHEDPEVKFNWYVDGVEVHNAKTKPREEQYNSTYRVVSVLTVLHQDWLNGKEYKCKVSNKGLPSSIEKTISKAKGQPREPQVYTLPPSREEMTKNQVSLTCLVKGFYPSDIAVEWESNGQPENNYKTTPPVLDSDGSFFLYSKLTVDKSRWQEGNVFSCSVMHEALHNHYTQKSLSLSP

SEQ ID NO: 273 - protein, 340 aa, Artificial Sequence
  an artificially synthesized sequence
ASTKGPSVFPLAPTSTSGRSANPRGSSKSTSGGTAALGCLVKDYFPEPVTVSWNSGALTSGVHTFPAVLQSSGLYSLSSVVTVPSSSLGTQTYICNVNHKPSNTKVDKRVEPKSCDKTHTCPPCPAPELRRGPSVFLFPPKPKDTLMISRTPEVTCVVVDVSHEDPEVKFNWYVDGVEVHNAKTKPREEQYNSTYRVVSVLTVLHQDWLNGKEYKCKVSNKGLPSSIEKTISKAKGQPREPQVYTLPPSREEMTKNQVSLTCLVKGFYPSDIAVEWESNGQPENNYKTTPPVLDSDGSFFLYSKLTVDKSRWQEGNVFSCSVMHEALHNHYTQKSLSLSP

SEQ ID NO: 274 - protein, 340 aa, Artificial Sequence
  an artificially synthesized sequence
ASTKGPSVFPLAPSTSTSGRSANPRGSKSTSGGTAALGCLVKDYFPEPVTVSWNSGALTSGVHTFPAVLQSSGLYSLSSVVTVPSSSLGTQTYICNVNHKPSNTKVDKRVEPKSCDKTHTCPPCPAPELRRGPSVFLFPPKPKDTLMISRTPEVTCVVVDVSHEDPEVKFNWYVDGVEVHNAKTKPREEQYNSTYRVVSVLTVLHQDWLNGKEYKCKVSNKGLPSSIEKTISKAKGQPREPQVYTLPPSREEMTKNQVSLTCLVKGFYPSDIAVEWESNGQPENNYKTTPPVLDSDGSFFLYSKLTVDKSRWQEGNVFSCSVMHEALHNHYTQKSLSLSP

SEQ ID NO: 275 - protein, 340 aa, Artificial Sequence
  an artificially synthesized sequence
ASTKGPSVFPLAPSSTSTSGRSANPRGKSTSGGTAALGCLVKDYFPEPVTVSWNSGALTSGVHTFPAVLQSSGLYSLSSVVTVPSSSLGTQTYICNVNHKPSNTKVDKRVEPKSCDKTHTCPPCPAPELRRGPSVFLFPPKPKDTLMISRTPEVTCVVVDVSHEDPEVKFNWYVDGVEVHNAKTKPREEQYNSTYRVVSVLTVLHQDWLNGKEYKCKVSNKGLPSSIEKTISKAKGQPREPQVYTLPPSREEMTKNQVSLTCLVKGFYPSDIAVEWESNGQPENNYKTTPPVLDSDGSFFLYSKLTVDKSRWQEGNVFSCSVMHEALHNHYTQKSLSLSP

SEQ ID NO: 276 - protein, 340 aa, Artificial Sequence
  an artificially synthesized sequence
ASTKGPSVFPLAPSSKSTSTSGRSANPRGTSGGTAALGCLVKDYFPEPVTVSWNSGALTSGVHTFPAVLQSSGLYSLSSVVTVPSSSLGTQTYICNVNHKPSNTKVDKRVEPKSCDKTHTCPPCPAPELRRGPSVFLFPPKPKDTLMISRTPEVTCVVVDVSHEDPEVKFNWYVDGVEVHNAKTKPREEQYNSTYRVVSVLTVLHQDWLNGKEYKCKVSNKGLPSSIEKTISKAKGQPREPQVYTLPPSREEMTKNQVSLTCLVKGFYPSDIAVEWESNGQPENNYKTTPPVLDSDGSFFLYSKLTVDKSRWQEGNVFSCSVMHEALHNHYTQKSLSLSP

SEQ ID NO: 277 - protein, 340 aa, Artificial Sequence
  an artificially synthesized sequence
ASTKGPSVFPLAPSSKSTTSTSGRSANPRGSGGTAALGCLVKDYFPEPVTVSWNSGALTSGVHTFPAVLQSSGLYSLSSVVTVPSSSLGTQTYICNVNHKPSNTKVDKRVEPKSCDKTHTCPPCPAPELRRGPSVFLFPPKPKDTLMISRTPEVTCVVVDVSHEDPEVKFNWYVDGVEVHNAKTKPREEQYNSTYRVVSVLTVLHQDWLNGKEYKCKVSNKGLPSSIEKTISKAKGQPREPQVYTLPPSREEMTKNQVSLTCLVKGFYPSDIAVEWESNGQPENNYKTTPPVLDSDGSFFLYSKLTVDKSRWQEGNVFSCSVMHEALHNHYTQKSLSLSP

SEQ ID NO: 278 - protein, 340 aa, Artificial Sequence
  an artificially synthesized sequence
ASTKGPSVFPLAPSSKSTSGTSTSGRSANPRGGTAALGCLVKDYFPEPVTVSWNSGALTSGVHTFPAVLQSSGLYSLSSVVTVPSSSLGTQTYICNVNHKPSNTKVDKRVEPKSCDKTHTCPPCPAPELRRGPSVFLFPPKPKDTLMISRTPEVTCVVVDVSHEDPEVKFNWYVDGVEVHNAKTKPREEQYNSTYRVVSVLTVLHQDWLNGKEYKCKVSNKGLPSSIEKTISKAKGQPREPQVYTLPPSREEMTKNQVSLTCLVKGFYPSDIAVEWESNGQPENNYKTTPPVLDSDGSFFLYSKLTVDKSRWQEGNVFSCSVMHEALHNHYTQKSLSLSP

SEQ ID NO: 279 - protein, 340 aa, Artificial Sequence
  an artificially synthesized sequence
ASTKGPSVFPLAPSSKSTSGGTTSTSGRSANPRGAALGCLVKDYFPEPVTVSWNSGALTSGVHTFPAVLQSSGLYSLSSVVTVPSSSLGTQTYICNVNHKPSNTKVDKRVEPKSCDKTHTCPPCPAPELRRGPSVFLFPPKPKDTLMISRTPEVTCVVVDVSHEDPEVKFNWYVDGVEVHNAKTKPREEQYNSTYRVVSVLTVLHQDWLNGKEYKCKVSNKGLPSSIEKTISKAKGQPREPQVYTLPPSREEMTKNQVSLTCLVKGFYPSDIAVEWESNGQPENNYKTTPPVLDSDGSFFLYSKLTVDKSRWQEGNVFSCSVMHEALHNHYTQKSLSLSP

SEQ ID NO: 280 - protein, 107 aa, Artificial Sequence [sequence omitted]

SEQ ID NO: 281 - protein, 107 aa, Artificial Sequence [sequence omitted]

SEQ ID NO: 282 - protein, 119 aa, Artificial Sequence
  an artificially synthesized sequence
DIQMTQSTSTSGRSANPRGPSSLSASVGDRVTITCRASQDISSYLNWYQQKPGKAPKLLIYYTSRLHSGVPSRFSGSGSGTDFTFTISSLQPEDIATYYCQQGNTLPYTFGQGTKVEIK

SEQ ID NO: 283 - protein, 119 aa, Artificial Sequence
  an artificially synthesized sequence
DIQMTQSPTSTSGRSANPRGSSLSASVGDRVTITCRASQDISSYLNWYQQKPGKAPKLLIYYTSRLHSGVPSRFSGSGSGTDFTFTISSLQPEDIATYYCQQGNTLPYTFGQGTKVEIK

SEQ ID NO: 284 - protein, 119 aa, Artificial Sequence
  an artificially synthesized sequence
DIQMTQSPSTSTSGRSANPRGSLSASVGDRVTITCRASQDISSYLNWYQQKPGKAPKLLIYYTSRLHSGVPSRFSGSGSGTDFTFTISSLQPEDIATYYCQQGNTLPYTFGQGTKVEIK

SEQ ID NO: 285 - protein, 119 aa, Artificial Sequence
  an artificially synthesized sequence
DIQMTQSPSSTSTSGRSANPRGLSASVGDRVTITCRASQDISSYLNWYQQKPGKAPKLLIYYTSRLHSGVPSRFSGSGSGTDFTFTISSLQPEDIATYYCQQGNTLPYTFGQGTKVEIK

SEQ ID NO: 286 - protein, 119 aa, Artificial Sequence
  an artificially synthesized sequence
DIQMTQSPSSLTSTSGRSANPRGSASVGDRVTITCRASQDISSYLNWYQQKPGKAPKLLIYYTSRLHSGVPSRFSGSGSGTDFTFTISSLQPEDIATYYCQQGNTLPYTFGQGTKVEIK

SEQ ID NO: 287 - protein, 119 aa, Artificial Sequence
  an artificially synthesized sequence
DIQMTQSPSSLSTSTSGRSANPRGASVGDRVTITCRASQDISSYLNWYQQKPGKAPKLLIYYTSRLHSGVPSRFSGSGSGTDFTFTISSLQPEDIATYYCQQGNTLPYTFGQGTKVEIK

SEQ ID NO: 288 - protein, 119 aa, Artificial Sequence
  an artificially synthesized sequence
DIQMTQSPSSLSATSTSGRSANPRGSVGDRVTITCRASQDISSYLNWYQQKPGKAPKLLIYYTSRLHSGVPSRFSGSGSGTDFTFTISSLQPEDIATYYCQQGNTLPYTFGQGTKVEIK

SEQ ID NO: 289 - protein, 119 aa, Artificial Sequence
  an artificially synthesized sequence
DIQMTQSPSSLSASTSTSGRSANPRGVGDRVTITCRASQDISSYLNWYQQKPGKAPKLLIYYTSRLHSGVPSRFSGSGSGTDFTFTISSLQPEDIATYYCQQGNTLPYTFGQGTKVEIK

SEQ ID NO: 290 - protein, 119 aa, Artificial Sequence
  an artificially synthesized sequence
DIQMTQSPSSLSASVTSTSGRSANPRGGDRVTITCRASQDISSYLNWYQQKPGKAPKLLIYYTSRLHSGVPSRFSGSGSGTDFTFTISSLQPEDIATYYCQQGNTLPYTFGQGTKVEIK

SEQ ID NO: 291 - protein, 119 aa, Artificial Sequence
  an artificially synthesized sequence
DIQMTQSPSSLSASVGTSTSGRSANPRGDRVTITCRASQDISSYLNWYQQKPGKAPKLLIYYTSRLHSGVPSRFSGSGSGTDFTFTISSLQPEDIATYYCQQGNTLPYTFGQGTKVEIK

SEQ ID NO: 292 - protein, 119 aa, Artificial Sequence
  an artificially synthesized sequence
DIQMTQSPSSLSASVGDTSTSGRSANPRGRVTITCRASQDISSYLNWYQQKPGKAPKLLIYYTSRLHSGVPSRFSGSGSGTDFTFTISSLQPEDIATYYCQQGNTLPYTFGQGTKVEIK

SEQ ID NO: 293 - protein, 119 aa, Artificial Sequence
  an artificially synthesized sequence
DIQMTQSPSSLSASVGDRTSTSGRSANPRGVTITCRASQDISSYLNWYQQKPGKAPKLLIYYTSRLHSGVPSRFSGSGSGTDFTFTISSLQPEDIATYYCQQGNTLPYTFGQGTKVEIK

SEQ ID NO: 294 - protein, 119 aa, Artificial Sequence
  an artificially synthesized sequence
DIQMTQSPSSLSASVGDRVTITCRASQDISSYLNWYQQKTSTSGRSANPRGPGKAPKLLIYYTSRLHSGVPSRFSGSGSGTDFTFTISSLQPEDIATYYCQQGNTLPYTFGQGTKVEIK

SEQ ID NO: 295 - protein, 119 aa, Artificial Sequence
  an artificially synthesized sequence
DIQMTQSPSSLSASVGDRVTITCRASQDISSYLNWYQQKPTSTSGRSANPRGGKAPKLLIYYTSRLHSGVPSRFSGSGSGTDFTFTISSLQPEDIATYYCQQGNTLPYTFGQGTKVEIK

SEQ ID NO: 296 - protein, 119 aa, Artificial Sequence
  an artificially synthesized sequence
DIQMTQSPSSLSASVGDRVTITCRASQDISSYLNWYQQKPGTSTSGRSANPRGKAPKLLIYYTSRLHSGVPSRFSGSGSGTDFTFTISSLQPEDIATYYCQQGNTLPYTFGQGTKVEIK

SEQ ID NO: 297 - protein, 119 aa, Artificial Sequence
  an artificially synthesized sequence
DIQMTQSPSSLSASVGDRVTITCRASQDISSYLNWYQQKPGKTSTSGRSANPRGAPKLLIYYTSRLHSGVPSRFSGSGSGTDFTFTISSLQPEDIATYYCQQGNTLPYTFGQGTKVEIK

SEQ ID NO: 298 - protein, 119 aa, Artificial Sequence
  an artificially synthesized sequence
DIQMTQSPSSLSASVGDRVTITCRASQDISSYLNWYQQKPGKATSTSGRSANPRGPKLLIYYTSRLHSGVPSRFSGSGSGTDFTFTISSLQPEDIATYYCQQGNTLPYTFGQGTKVEIK

SEQ ID NO: 299 - protein, 119 aa, Artificial Sequence
  an artificially synthesized sequence
DIQMTQSPSSLSASVGDRVTITCRASQDISSYLNWYQQKPGKAPTSTSGRSANPRGKLLIYYTSRLHSGVPSRFSGSGSGTDFTFTISSLQPEDIATYYCQQGNTLPYTFGQGTKVEIK

SEQ ID NO: 300 - protein, 119 aa, Artificial Sequence
  an artificially synthesized sequence
DIQMTQSPSSLSASVGDRVTITCRASQDISSYLNWYQQKPGKAPKTSTSGRSANPRGLLIYYTSRLHSGVPSRFSGSGSGTDFTFTISSLQPEDIATYYCQQGNTLPYTFGQGTKVEIK

SEQ ID NO: 301 - protein, 119 aa, Artificial Sequence
  an artificially synthesized sequence
DIQMTQSPSSLSASVGDRVTITCRASQDISSYLNWYQQKPGKAPKLLIYTSTSGRSANPRGYTSRLHSGVPSRFSGSGSGTDFTFTISSLQPEDIATYYCQQGNTLPYTFGQGTKVEIK

SEQ ID NO: 302 - protein, 119 aa, Artificial Sequence
  an artificially synthesized sequence
DIQMTQSPSSLSASVGDRVTITCRASQDISSYLNWYQQKPGKAPKLLIYYTSTSGRSANPRGTSRLHSGVPSRFSGSGSGTDFTFTISSLQPEDIATYYCQQGNTLPYTFGQGTKVEIK

SEQ ID NO: 303 - protein, 119 aa, Artificial Sequence
  an artificially synthesized sequence
DIQMTQSPSSLSASVGDRVTITCRASQDISSYLNWYQQKPGKAPKLLIYYTTSTSGRSANPRGSRLHSGVPSRFSGSGSGTDFTFTISSLQPEDIATYYCQQGNTLPYTFGQGTKVEIK

SEQ ID NO: 304 - protein, 119 aa, Artificial Sequence
  an artificially synthesized sequence
DIQMTQSPSSLSASVGDRVTITCRASQDISSYLNWYQQKPGKAPKLLIYYTSTSTSGRSANPRGRLHSGVPSRFSGSGSGTDFTFTISSLQPEDIATYYCQQGNTLPYTFGQGTKVEIK

SEQ ID NO: 305 - protein, 119 aa, Artificial Sequence
  an artificially synthesized sequence
DIQMTQSPSSLSASVGDRVTITCRASQDISSYLNWYQQKPGKAPKLLIYYTSRTSTSGRSANPRGLHSGVPSRFSGSGSGTDFTFTISSLQPEDIATYYCQQGNTLPYTFGQGTKVEIK

SEQ ID NO: 306 - protein, 119 aa, Artificial Sequence
  an artificially synthesized sequence
DIQMTQSPSSLSASVGDRVTITCRASQDISSYLNWYQQKPGKAPKLLIYYTSRLTSTSGRSANPRGHSGVPSRFSGSGSGTDFTFTISSLQPEDIATYYCQQGNTLPYTFGQGTKVEIK

SEQ ID NO: 307 - protein, 119 aa, Artificial Sequence
  an artificially synthesized sequence
DIQMTQSPSSLSASVGDRVTITCRASQDISSYLNWYQQKPGKAPKLLIYYTSRLHTSTSGRSANPRGSGVPSRFSGSGSGTDFTFTISSLQPEDIATYYCQQGNTLPYTFGQGTKVEIK

SEQ ID NO: 308 - protein, 119 aa, Artificial Sequence
  an artificially synthesized sequence
DIQMTQSPSSLSASVGDRVTITCRASQDISSYLNWYQQKPGKAPKLLIYYTSRLHSTSTSGRSANPRGGVPSRFSGSGSGTDFTFTISSLQPEDIATYYCQQGNTLPYTFGQGTKVEIK

SEQ ID NO: 309 - protein, 119 aa, Artificial Sequence
  an artificially synthesized sequence
DIQMTQSPSSLSASVGDRVTITCRASQDISSYLNWYQQKPGKAPKLLIYYTSRLHSGTSTSGRSANPRGVPSRFSGSGSGTDFTFTISSLQPEDIATYYCQQGNTLPYTFGQGTKVEIK

SEQ ID NO: 310 - protein, 119 aa, Artificial Sequence
  an artificially synthesized sequence
DIQMTQSPSSLSASVGDRVTITCRASQDISSYLNWYQQKPGKAPKLLIYYTSRLHSGVTSTSGRSANPRGPSRFSGSGSGTDFTFTISSLQPEDIATYYCQQGNTLPYTFGQGTKVEIK

SEQ ID NO: 311 - protein, 119 aa, Artificial Sequence
  an artificially synthesized sequence
DIQMTQSPSSLSASVGDRVTITCRASQDISSYLNWYQQKPGKAPKLLIYYTSRLHSGVPTSTSGRSANPRGSRFSGSGSGTDFTFTISSLQPEDIATYYCQQGNTLPYTFGQGTKVEIK

SEQ ID NO: 312 - protein, 119 aa, Artificial Sequence
  an artificially synthesized sequence
DIQMTQSPSSLSASVGDRVTITCRASQDISSYLNWYQQKPGKAPKLLIYYTSRLHSGVPSTSTSGRSANPRGRFSGSGSGTDFTFTISSLQPEDIATYYCQQGNTLPYTFGQGTKVEIK

SEQ ID NO: 313 - protein, 119 aa, Artificial Sequence
  an artificially synthesized sequence
DIQMTQSPSSLSASVGDRVTITCRASQDISSYLNWYQQKPGKAPKLLIYYTSRLHSGVPSRFSGSGSGTDFTFTISSLQPEDIATYYCQQGNTLPYTSTSGRSANPRGTFGQGTKVEIK

SEQ ID NO: 314 - protein, 119 aa, Artificial Sequence
  an artificially synthesized sequence
DIQMTQSPSSLSASVGDRVTITCRASQDISSYLNWYQQKPGKAPKLLIYYTSRLHSGVPSRFSGSGSGTDFTFTISSLQPEDIATYYCQQGNTLPYTTSTSGRSANPRGFGQGTKVEIK

SEQ ID NO: 315 - protein, 119 aa, Artificial Sequence
  an artificially synthesized sequence
DIQMTQSPSSLSASVGDRVTITCRASQDISSYLNWYQQKPGKAPKLLIYYTSRLHSGVPSRFSGSGSGTDFTFTISSLQPEDIATYYCQQGNTLPYTFTSTSGRSANPRGGQGTKVEIK

SEQ ID NO: 316 - protein, 119 aa, Artificial Sequence
  an artificially synthesized sequence
DIQMTQSPSSLSASVGDRVTITCRASQDISSYLNWYQQKPGKAPKLLIYYTSRLHSGVPSRFSGSGSGTDFTFTISSLQPEDIATYYCQQGNTLPYTFGTSTSGRSANPRGQGTKVEIK

SEQ ID NO: 317 - protein, 119 aa, Artificial Sequence
  an artificially synthesized sequence
DIQMTQSPSSLSASVGDRVTITCRASQDISSYLNWYQQKPGKAPKLLIYYTSRLHSGVPSRFSGSGSGTDFTFTISSLQPEDIATYYCQQGNTLPYTFGQTSTSGRSANPRGGTKVEIK

SEQ ID NO: 318 - protein, 119 aa, Artificial Sequence
  an artificially synthesized sequence
DIQMTQSPSSLSASVGDRVTITCRASQDISSYLNWYQQKPGKAPKLLIYYTSRLHSGVPSRFSGSGSGTDFTFTISSLQPEDIATYYCQQGNTLPYTFGQGTSTSGRSANPRGTKVEIK

SEQ ID NO: 319 - protein, 119 aa, Artificial Sequence
  an artificially synthesized sequence
DIQMTQSPSSLSASVGDRVTITCRASQDISSYLNWYQQKPGKAPKLLIYYTSRLHSGVPSRFSGSGSGTDFTFTISSLQPEDIATYYCQQGNTLPYTFGQGTTSTSGRSANPRGKVEIK

SEQ ID NO: 320 - protein, 119 aa, Artificial Sequence
  an artificially synthesized sequence
DIQMTQSPSSLSASVGDRVTITCRASQDISSYLNWYQQKPGKAPKLLIYYTSRLHSGVPSRFSGSGSGTDFTFTISSLQPEDIATYYCQQGNTLPYTFGQGTKTSTSGRSANPRGVEIK

SEQ ID NO: 321 - protein, 119 aa, Artificial Sequence
  an artificially synthesized sequence
DIQMTQSPSSLSASVGDRVTITCRASQDISSYLNWYQQKPGKAPKLLIYYTSRLHSGVPSRFSGSGSGTDFTFTISSLQPEDIATYYCQQGNTLPYTFGQGTKVTSTSGRSANPRGEIK

SEQ ID NO: 322 - protein, 119 aa, Artificial Sequence
  an artificially synthesized sequence
DIQMTQSPSSLSASVGDRVTITCRASQDISSYLNWYQQKPGKAPKLLIYYTSRLHSGVPSRFSGSGSGTDFTFTISSLQPEDIATYYCQQGNTLPYTFGQGTKVETSTSGRSANPRGIK

SEQ ID NO: 323 - protein, 119 aa, Artificial Sequence
  an artificially synthesized sequence
DIQMTQSPSSLSASVGDRVTITCRASQDISSYLNWYQQKPGKAPKLLIYYTSRLHSGVPSRFSGSGSGTDFTFTISSLQPEDIATYYCQQGNTLPYTFGQGTKVEITSTSGRSANPRGK

SEQ ID NO: 324 - protein, 119 aa, Artificial Sequence
  an artificially synthesized sequence
DIQMTQSPSSLSASVGDRVTITCRASQDISSYLNWYQQKPGKAPKLLIYYTSRLHSGVPSRFSGSGSGTDFTFTISSLQPEDIATYYCQQGNTLPYTFGQGTKVEIKTSTSGRSANPRG

SEQ ID NO: 325 - protein, 119 aa, Artificial Sequence
  an artificially synthesized sequence
RTSTSGRSANPRGTVAAPSVFIFPPSDEQLKSGTASVVCLLNNFYPREAKVQWKVDNALQSGNSQESVTEQDSKDSTYSLSSTLTLSKADYEKHKVYACEVTHQGLSSPVTKSFNRGEC

SEQ ID NO: 326 - protein, 119 aa, Artificial Sequence
  an artificially synthesized sequence
RTTSTSGRSANPRGVAAPSVFIFPPSDEQLKSGTASVVCLLNNFYPREAKVQWKVDNALQSGNSQESVTEQDSKDSTYSLSSTLTLSKADYEKHKVYACEVTHQGLSSPVTKSFNRGEC

SEQ ID NO: 327 - protein, 119 aa, Artificial Sequence
  an artificially synthesized sequence
RTVTSTSGRSANPRGAAPSVFIFPPSDEQLKSGTASVVCLLNNFYPREAKVQWKVDNALQSGNSQESVTEQDSKDSTYSLSSTLTLSKADYEKHKVYACEVTHQGLSSPVTKSFNRGEC

SEQ ID NO: 328 - protein, 119 aa, Artificial Sequence
  an artificially synthesized sequence
RTVATSTSGRSANPRGAPSVFIFPPSDEQLKSGTASVVCLLNNFYPREAKVQWKVDNALQSGNSQESVTEQDSKDSTYSLSSTLTLSKADYEKHKVYACEVTHQGLSSPVTKSFNRGEC

SEQ ID NO: 329 - protein, 119 aa, Artificial Sequence
  an artificially synthesized sequence
RTVAATSTSGRSANPRGPSVFIFPPSDEQLKSGTASVVCLLNNFYPREAKVQWKVDNALQSGNSQESVTEQDSKDSTYSLSSTLTLSKADYEKHKVYACEVTHQGLSSPVTKSFNRGEC

SEQ ID NO: 330 - protein, 119 aa, Artificial Sequence
  an artificially synthesized sequence
RTVAAPTSTSGRSANPRGSVFIFPPSDEQLKSGTASVVCLLNNFYPREAKVQWKVDNALQSGNSQESVTEQDSKDSTYSLSSTLTLSKADYEKHKVYACEVTHQGLSSPVTKSFNRGEC

SEQ ID NO: 331 - protein, 119 aa, Artificial Sequence
  an artificially synthesized sequence
RTVAAPSVTSTSGRSANPRGFIFPPSDEQLKSGTASVVCLLNNFYPREAKVQWKVDNALQSGNSQESVTEQDSKDSTYSLSSTLTLSKADYEKHKVYACEVTHQGLSSPVTKSFNRGEC

SEQ ID NO: 332 - protein, 119 aa, Artificial Sequence
  an artificially synthesized sequence
RTVAAPSVFTSTSGRSANPRGIFPPSDEQLKSGTASVVCLLNNFYPREAKVQWKVDNALQSGNSQESVTEQDSKDSTYSLSSTLTLSKADYEKHKVYACEVTHQGLSSPVTKSFNRGEC

SEQ ID NO: 333 - protein, 119 aa, Artificial Sequence
  an artificially synthesized sequence
RTVAAPSVFITSTSGRSANPRGFPPSDEQLKSGTASVVCLLNNFYPREAKVQWKVDNALQSGNSQESVTEQDSKDSTYSLSSTLTLSKADYEKHKVYACEVTHQGLSSPVTKSFNRGEC

SEQ ID NO: 334 - protein, 119 aa, Artificial Sequence
  an artificially synthesized sequence
RTVAAPSVFIFTSTSGRSANPRGPPSDEQLKSGTASVVCLLNNFYPREAKVQWKVDNALQSGNSQESVTEQDSKDSTYSLSSTLTLSKADYEKHKVYACEVTHQGLSSPVTKSFNRGEC

SEQ ID NO: 335 - protein, 119 aa, Artificial Sequence
  an artificially synthesized sequence
RTVAAPSVFIFPTSTSGRSANPRGPSDEQLKSGTASVVCLLNNFYPREAKVQWKVDNALQSGNSQESVTEQDSKDSTYSLSSTLTLSKADYEKHKVYACEVTHQGLSSPVTKSFNRGEC

SEQ ID NO: 336 - protein, 119 aa, Artificial Sequence
  an artificially synthesized sequence
RTVAAPSVFIFPPTSTSGRSANPRGSDEQLKSGTASVVCLLNNFYPREAKVQWKVDNALQSGNSQESVTEQDSKDSTYSLSSTLTLSKADYEKHKVYACEVTHQGLSSPVTKSFNRGEC

SEQ ID NO: 337 - protein, 119 aa, Artificial Sequence
  an artificially synthesized sequence
RTVAAPSVFIFPPSTSTSGRSANPRGDEQLKSGTASVVCLLNNFYPREAKVQWKVDNALQSGNSQESVTEQDSKDSTYSLSSTLTLSKADYEKHKVYACEVTHQGLSSPVTKSFNRGEC

SEQ ID NO: 338 - protein, 119 aa, Artificial Sequence
  an artificially synthesized sequence
RTVAAPSVFIFPPSDTSTSGRSANPRGEQLKSGTASVVCLLNNFYPREAKVQWKVDNALQSGNSQESVTEQDSKDSTYSLSSTLTLSKADYEKHKVYACEVTHQGLSSPVTKSFNRGEC

SEQ ID NO: 339 - protein, 119 aa, Artificial Sequence
  an artificially synthesized sequence
RTVAAPSVFIFPPSDETSTSGRSANPRGQLKSGTASVVCLLNNFYPREAKVQWKVDNALQSGNSQESVTEQDSKDSTYSLSSTLTLSKADYEKHKVYACEVTHQGLSSPVTKSFNRGEC

SEQ ID NO: 340 - protein, 119 aa, Artificial Sequence
  an artificially synthesized sequence
RTVAAPSVFIFPPSDEQTSTSGRSANPRGLKSGTASVVCLLNNFYPREAKVQWKVDNALQSGNSQESVTEQDSKDSTYSLSSTLTLSKADYEKHKVYACEVTHQGLSSPVTKSFNRGEC

SEQ ID NO: 341 - protein, 119 aa, Artificial Sequence
  an artificially synthesized sequence
RTVAAPSVFIFPPSDEQLTSTSGRSANPRGKSGTASVVCLLNNFYPREAKVQWKVDNALQSGNSQESVTEQDSKDSTYSLSSTLTLSKADYEKHKVYACEVTHQGLSSPVTKSFNRGEC

SEQ ID NO: 342 - protein, 119 aa, Artificial Sequence
  an artificially synthesized sequence
RTVAAPSVFIFPPSDEQLKTSTSGRSANPRGSGTASVVCLLNNFYPREAKVQWKVDNALQSGNSQESVTEQDSKDSTYSLSSTLTLSKADYEKHKVYACEVTHQGLSSPVTKSFNRGEC

SEQ ID NO: 343 - protein, 119 aa, Artificial Sequence
  an artificially synthesized sequence
RTVAAPSVFIFPPSDEQLKSTSTSGRSANPRGGTASVVCLLNNFYPREAKVQWKVDNALQSGNSQESVTEQDSKDSTYSLSSTLTLSKADYEKHKVYACEVTHQGLSSPVTKSFNRGEC

SEQ ID NO: 344 - protein, 119 aa, Artificial Sequence
  an artificially synthesized sequence
RTVAAPSVFIFPPSDEQLKSGTSTSGRSANPRGTASVVCLLNNFYPREAKVQWKVDNALQSGNSQESVTEQDSKDSTYSLSSTLTLSKADYEKHKVYACEVTHQGLSSPVTKSFNRGEC

SEQ ID NO: 345 - protein, 119 aa, Artificial Sequence
  an artificially synthesized sequence
RTVAAPSVFIFPPSDEQLKSGTTSTSGRSANPRGASVVCLLNNFYPREAKVQWKVDNALQSGNSQESVTEQDSKDSTYSLSSTLTLSKADYEKHKVYACEVTHQGLSSPVTKSFNRGEC

SEQ ID NO: 346 - protein, 119 aa, Artificial Sequence
  an artificially synthesized sequence
RTVAAPSVFIFPPSDEQLKSGTATSTSGRSANPRGSVVCLLNNFYPREAKVQWKVDNALQSGNSQESVTEQDSKDSTYSLSSTLTLSKADYEKHKVYACEVTHQGLSSPVTKSFNRGEC

SEQ ID NO: 347 - protein, 459 aa, Artificial Sequence
  an artificially synthesized sequence
QVQLQESTSTSGRSANPRGGPGLVRPSQTLSLTCTVSGYSITSDHAWSWVRQPPGRGLEWIGYISYSGITTYNPSLKSRVTMLRDTSKNQFSLRLSSVTAADTAVYYCARSLARTTAMDYWGQGSLVTVSSASTKGPSVFPLAPSSKSTSGGTAALGCLVKDYFPEPVTVSWNSGALTSGVHTFPAVLQSSGLYSLSSVVTVPSSSLGTQTYICNVNHKPSNTKVDKRVEPKSCDKTHTCPPCPAPELRRGPSVFLFPPKPKDTLMISRTPEVTCVVVDVSHEDPEVKFNWYVDGVEVHNAKTKPREEQYNSTYRVVSVLTVLHQDWLNGKEYKCKVSNKGLPSSIEKTISKAKGQPREPQVYTLPPSREEMTKNQVSLTCLVKGFYPSDIAVEWESNGQPENNYKTTPPVLDSDGSFFLYSKLTVDKSRWQEGNVFSCSVMHEALHNHYTQKSLSLSP

SEQ ID NO: 348 - protein, 459 aa, Artificial Sequence
  an artificially synthesized sequence
QVQLQESGTSTSGRSANPRGPGLVRPSQTLSLTCTVSGYSITSDHAWSWVRQPPGRGLEWIGYISYSGITTYNPSLKSRVTMLRDTSKNQFSLRLSSVTAADTAVYYCARSLARTTAMDYWGQGSLVTVSSASTKGPSVFPLAPSSKSTSGGTAALGCLVKDYFPEPVTVSWNSGALTSGVHTFPAVLQSSGLYSLSSVVTVPSSSLGTQTYICNVNHKPSNTKVDKRVEPKSCDKTHTCPPCPAPELRRGPSVFLFPPKPKDTLMISRTPEVTCVVVDVSHEDPEVKFNWYVDGVEVHNAKTKPREEQYNSTYRVVSVLTVLHQDWLNGKEYKCKVSNKGLPSSIEKTISKAKGQPREPQVYTLPPSREEMTKNQVSLTCLVKGFYPSDIAVEWESNGQPENNYKTTPPVLDSDGSFFLYSKLTVDKSRWQEGNVFSCSVMHEALHNHYTQKSLSLSP

SEQ ID NO: 349 - protein, 459 aa, Artificial Sequence
  an artificially synthesized sequence
QVQLQESGPTSTSGRSANPRGGLVRPSQTLSLTCTVSGYSITSDHAWSWVRQPPGRGLEWIGYISYSGITTYNPSLKSRVTMLRDTSKNQFSLRLSSVTAADTAVYYCARSLARTTAMDYWGQGSLVTVSSASTKGPSVFPLAPSSKSTSGGTAALGCLVKDYFPEPVTVSWNSGALTSGVHTFPAVLQSSGLYSLSSVVTVPSSSLGTQTYICNVNHKPSNTKVDKRVEPKSCDKTHTCPPCPAPELRRGPSVFLFPPKPKDTLMISRTPEVTCVVVDVSHEDPEVKFNWYVDGVEVHNAKTKPREEQYNSTYRVVSVLTVLHQDWLNGKEYKCKVSNKGLPSSIEKTISKAKGQPREPQVYTLPPSREEMTKNQVSLTCLVKGFYPSDIAVEWESNGQPENNYKTTPPVLDSDGSFFLYSKLTVDKSRWQEGNVFSCSVMHEALHNHYTQKSLSLSP

SEQ ID NO: 350 - protein, 459 aa, Artificial Sequence
  an artificially synthesized sequence
QVQLQESGPGTSTSGRSANPRGLVRPSQTLSLTCTVSGYSITSDHAWSWVRQPPGRGLEWIGYISYSGITTYNPSLKSRVTMLRDTSKNQFSLRLSSVTAADTAVYYCARSLARTTAMDYWGQGSLVTVSSASTKGPSVFPLAPSSKSTSGGTAALGCLVKDYFPEPVTVSWNSGALTSGVHTFPAVLQSSGLYSLSSVVTVPSSSLGTQTYICNVNHKPSNTKVDKRVEPKSCDKTHTCPPCPAPELRRGPSVFLFPPKPKDTLMISRTPEVTCVVVDVSHEDPEVKFNWYVDGVEVHNAKTKPREEQYNSTYRVVSVLTVLHQDWLNGKEYKCKVSNKGLPSSIEKTISKAKGQPREPQVYTLPPSREEMTKNQVSLTCLVKGFYPSDIAVEWESNGQPENNYKTTPPVLDSDGSFFLYSKLTVDKSRWQEGNVFSCSVMHEALHNHYTQKSLSLSP

SEQ ID NO: 351 - protein, 459 aa, Artificial Sequence
  an artificially synthesized sequence
QVQLQESGPGLTSTSGRSANPRGVRPSQTLSLTCTVSGYSITSDHAWSWVRQPPGRGLEWIGYISYSGITTYNPSLKSRVTMLRDTSKNQFSLRLSSVTAADTAVYYCARSLARTTAMDYWGQGSLVTVSSASTKGPSVFPLAPSSKSTSGGTAALGCLVKDYFPEPVTVSWNSGALTSGVHTFPAVLQSSGLYSLSSVVTVPSSSLGTQTYICNVNHKPSNTKVDKRVEPKSCDKTHTCPPCPAPELRRGPSVFLFPPKPKDTLMISRTPEVTCVVVDVSHEDPEVKFNWYVDGVEVHNAKTKPREEQYNSTYRVVSVLTVLHQDWLNGKEYKCKVSNKGLPSSIEKTISKAKGQPREPQVYTLPPSREEMTKNQVSLTCLVKGFYPSDIAVEWESNGQPENNYKTTPPVLDSDGSFFLYSKLTVDKSRWQEGNVFSCSVMHEALHNHYTQKSLSLSP

SEQ ID NO: 352 - protein, 459 aa, Artificial Sequence
  an artificially synthesized sequence
QVQLQESGPGLVTSTSGRSANPRGRPSQTLSLTCTVSGYSITSDHAWSWVRQPPGRGLEWIGYISYSGITTYNPSLKSRVTMLRDTSKNQFSLRLSSVTAADTAVYYCARSLARTTAMDYWGQGSLVTVSSASTKGPSVFPLAPSSKSTSGGTAALGCLVKDYFPEPVTVSWNSGALTSGVHTFPAVLQSSGLYSLSSVVTVPSSSLGTQTYICNVNHKPSNTKVDKRVEPKSCDKTHTCPPCPAPELRRGPSVFLFPPKPKDTLMISRTPEVTCVVVDVSHEDPEVKFNWYVDGVEVHNAKTKPREEQYNSTYRVVSVLTVLHQDWLNGKEYKCKVSNKGLPSSIEKTISKAKGQPREPQVYTLPPSREEMTKNQVSLTCLVKGFYPSDIAVEWESNGQPENNYKTTPPVLDSDGSFFLYSKLTVDKSRWQEGNVFSCSVMHEALHNHYTQKSLSLSP

SEQ ID NO: 353 - protein, 459 aa, Artificial Sequence
  an artificially synthesized sequence
QVQLQESGPGLVRTSTSGRSANPRGPSQTLSLTCTVSGYSITSDHAWSWVRQPPGRGLEWIGYISYSGITTYNPSLKSRVTMLRDTSKNQFSLRLSSVTAADTAVYYCARSLARTTAMDYWGQGSLVTVSSASTKGPSVFPLAPSSKSTSGGTAALGCLVKDYFPEPVTVSWNSGALTSGVHTFPAVLQSSGLYSLSSVVTVPSSSLGTQTYICNVNHKPSNTKVDKRVEPKSCDKTHTCPPCPAPELRRGPSVFLFPPKPKDTLMISRTPEVTCVVVDVSHEDPEVKFNWYVDGVEVHNAKTKPREEQYNSTYRVVSVLTVLHQDWLNGKEYKCKVSNKGLPSSIEKTISKAKGQPREPQVYTLPPSREEMTKNQVSLTCLVKGFYPSDIAVEWESNGQPENNYKTTPPVLDSDGSFFLYSKLTVDKSRWQEGNVFSCSVMHEALHNHYTQKSLSLSP

SEQ ID NO: 354 - protein, 459 aa, Artificial Sequence
  an artificially synthesized sequence
QVQLQESGPGLVRPTSTSGRSANPRGSQTLSLTCTVSGYSITSDHAWSWVRQPPGRGLEWIGYISYSGITTYNPSLKSRVTMLRDTSKNQFSLRLSSVTAADTAVYYCARSLARTTAMDYWGQGSLVTVSSASTKGPSVFPLAPSSKSTSGGTAALGCLVKDYFPEPVTVSWNSGALTSGVHTFPAVLQSSGLYSLSSVVTVPSSSLGTQTYICNVNHKPSNTKVDKRVEPKSCDKTHTCPPCPAPELRRGPSVFLFPPKPKDTLMISRTPEVTCVVVDVSHEDPEVKFNWYVDGVEVHNAKTKPREEQYNSTYRVVSVLTVLHQDWLNGKEYKCKVSNKGLPSSIEKTISKAKGQPREPQVYTLPPSREEMTKNQVSLTCLVKGFYPSDIAVEWESNGQPENNYKTTPPVLDSDGSFFLYSKLTVDKSRWQEGNVFSCSVMHEALHNHYTQKSLSLSP

SEQ ID NO: 355 - protein, 459 aa, Artificial Sequence
  an artificially synthesized sequence
QVQLQESGPGLVRPSTSTSGRSANPRGQTLSLTCTVSGYSITSDHAWSWVRQPPGRGLEWIGYISYSGITTYNPSLKSRVTMLRDTSKNQFSLRLSSVTAADTAVYYCARSLARTTAMDYWGQGSLVTVSSASTKGPSVFPLAPSSKSTSGGTAALGCLVKDYFPEPVTVSWNSGALTSGVHTFPAVLQSSGLYSLSSVVTVPSSSLGTQTYICNVNHKPSNTKVDKRVEPKSCDKTHTCPPCPAPELRRGPSVFLFPPKPKDTLMISRTPEVTCVVVDVSHEDPEVKFNWYVDGVEVHNAKTKPREEQYNSTYRVVSVLTVLHQDWLNGKEYKCKVSNKGLPSSIEKTISKAKGQPREPQVYTLPPSREEMTKNQVSLTCLVKGFYPSDIAVEWESNGQPENNYKTTPPVLDSDGSFFLYSKLTVDKSRWQEGNVFSCSVMHEALHNHYTQKSLSLSP

SEQ ID NO: 356 - protein, 459 aa, Artificial Sequence
  an artificially synthesized sequence
QVQLQESGPGLVRPSQTLSLTCTVSGYSITSDHAWSWVRQPTSTSGRSANPRGPGRGLEWIGYISYSGITTYNPSLKSRVTMLRDTSKNQFSLRLSSVTAADTAVYYCARSLARTTAMDYWGQGSLVTVSSASTKGPSVFPLAPSSKSTSGGTAALGCLVKDYFPEPVTVSWNSGALTSGVHTFPAVLQSSGLYSLSSVVTVPSSSLGTQTYICNVNHKPSNTKVDKRVEPKSCDKTHTCPPCPAPELRRGPSVFLFPPKPKDTLMISRTPEVTCVVVDVSHEDPEVKFNWYVDGVEVHNAKTKPREEQYNSTYRVVSVLTVLHQDWLNGKEYKCKVSNKGLPSSIEKTISKAKGQPREPQVYTLPPSREEMTKNQVSLTCLVKGFYPSDIAVEWESNGQPENNYKTTPPVLDSDGSFFLYSKLTVDKSRWQEGNVFSCSVMHEALHNHYTQKSLSLSP

SEQ ID NO: 357 - protein, 459 aa, Artificial Sequence
  an artificially synthesized sequence
QVQLQESGPGLVRPSQTLSLTCTVSGYSITSDHAWSWVRQPPTSTSGRSANPRGGRGLEWIGYISYSGITTYNPSLKSRVTMLRDTSKNQFSLRLSSVTAADTAVYYCARSLARTTAMDYWGQGSLVTVSSASTKGPSVFPLAPSSKSTSGGTAALGCLVKDYFPEPVTVSWNSGALTSGVHTFPAVLQSSGLYSLSSVVTVPSSSLGTQTYICNVNHKPSNTKVDKRVEPKSCDKTHTCPPCPAPELRRGPSVFLFPPKPKDTLMISRTPEVTCVVVDVSHEDPEVKFNWYVDGVEVHNAKTKPREEQYNSTYRVVSVLTVLHQDWLNGKEYKCKVSNKGLPSSIEKTISKAKGQPREPQVYTLPPSREEMTKNQVSLTCLVKGFYPSDIAVEWESNGQPENNYKTTPPVLDSDGSFFLYSKLTVDKSRWQEGNVFSCSVMHEALHNHYTQKSLSLSP

SEQ ID NO: 358 - protein, 459 aa, Artificial Sequence
  an artificially synthesized sequence
QVQLQESGPGLVRPSQTLSLTCTVSGYSITSDHAWSWVRQPPGTSTSGRSANPRGRGLEWIGYISYSGITTYNPSLKSRVTMLRDTSKNQFSLRLSSVTAADTAVYYCARSLARTTAMDYWGQGSLVTVSSASTKGPSVFPLAPSSKSTSGGTAALGCLVKDYFPEPVTVSWNSGALTSGVHTFPAVLQSSGLYSLSSVVTVPSSSLGTQTYICNVNHKPSNTKVDKRVEPKSCDKTHTCPPCPAPELRRGPSVFLFPPKPKDTLMISRTPEVTCVVVDVSHEDPEVKFNWYVDGVEVHNAKTKPREEQYNSTYRVVSVLTVLHQDWLNGKEYKCKVSNKGLPSSIEKTISKAKGQPREPQVYTLPPSREEMTKNQVSLTCLVKGFYPSDIAVEWESNGQPENNYKTTPPVLDSDGSFFLYSKLTVDKSRWQEGNVFSCSVMHEALHNHYTQKSLSLSP

SEQ ID NO: 359 - protein, 459 aa, Artificial Sequence
  an artificially synthesized sequence
QVQLQESGPGLVRPSQTLSLTCTVSGYSITSDHAWSWVRQPPGRTSTSGRSANPRGGLEWIGYISYSGITTYNPSLKSRVTMLRDTSKNQFSLRLSSVTAADTAVYYCARSLARTTAMDYWGQGSLVTVSSASTKGPSVFPLAPSSKSTSGGTAALGCLVKDYFPEPVTVSWNSGALTSGVHTFPAVLQSSGLYSLSSVVTVPSSSLGTQTYICNVNHKPSNTKVDKRVEPKSCDKTHTCPPCPAPELRRGPSVFLFPPKPKDTLMISRTPEVTCVVVDVSHEDPEVKFNWYVDGVEVHNAKTKPREEQYNSTYRVVSVLTVLHQDWLNGKEYKCKVSNKGLPSSIEKTISKAKGQPREPQVYTLPPSREEMTKNQVSLTCLVKGFYPSDIAVEWESNGQPENNYKTTPPVLDSDGSFFLYSKLTVDKSRWQEGNVFSCSVMHEALHNHYTQKSLSLSP

SEQ ID NO: 360 - protein, 459 aa, Artificial Sequence
  an artificially synthesized sequence
QVQLQESGPGLVRPSQTLSLTCTVSGYSITSDHAWSWVRQPPGRGTSTSGRSANPRGLEWIGYISYSGITTYNPSLKSRVTMLRDTSKNQFSLRLSSVTAADTAVYYCARSLARTTAMDYWGQGSLVTVSSASTKGPSVFPLAPSSKSTSGGTAALGCLVKDYFPEPVTVSWNSGALTSGVHTFPAVLQSSGLYSLSSVVTVPSSSLGTQTYICNVNHKPSNTKVDKRVEPKSCDKTHTCPPCPAPELRRGPSVFLFPPKPKDTLMISRTPEVTCVVVDVSHEDPEVKFNWYVDGVEVHNAKTKPREEQYNSTYRVVSVLTVLHQDWLNGKEYKCKVSNKGLPSSIEKTISKAKGQPREPQVYTLPPSREEMTKNQVSLTCLVKGFYPSDIAVEWESNGQPENNYKTTPPVLDSDGSFFLYSKLTVDKSRWQEGNVFSCSVMHEALHNHYTQKSLSLSP

SEQ ID NO: 361 - protein, 459 aa, Artificial Sequence
  an artificially synthesized sequence
QVQLQESGPGLVRPSQTLSLTCTVSGYSITSDHAWSWVRQPPGRGLTSTSGRSANPRGEWIGYISYSGITTYNPSLKSRVTMLRDTSKNQFSLRLSSVTAADTAVYYCARSLARTTAMDYWGQGSLVTVSSASTKGPSVFPLAPSSKSTSGGTAALGCLVKDYFPEPVTVSWNSGALTSGVHTFPAVLQSSGLYSLSSVVTVPSSSLGTQTYICNVNHKPSNTKVDKRVEPKSCDKTHTCPPCPAPELRRGPSVFLFPPKPKDTLMISRTPEVTCVVVDVSHEDPEVKFNWYVDGVEVHNAKTKPREEQYNSTYRVVSVLTVLHQDWLNGKEYKCKVSNKGLPSSIEKTISKAKGQPREPQVYTLPPSREEMTKNQVSLTCLVKGFYPSDIAVEWESNGQPENNYKTTPPVLDSDGSFFLYSKLTVDKSRWQEGNVFSCSVMHEALHNHYTQKSLSLSP

SEQ ID NO: 362 - protein, 459 aa, Artificial Sequence
  an artificially synthesized sequence
QVQLQESGPGLVRPSQTLSLTCTVSGYSITSDHAWSWVRQPPGRGLEWIGYISYSGTSTSGRSANPRGITTYNPSLKSRVTMLRDTSKNQFSLRLSSVTAADTAVYYCARSLARTTAMDYWGQGSLVTVSSASTKGPSVFPLAPSSKSTSGGTAALGCLVKDYFPEPVTVSWNSGALTSGVHTFPAVLQSSGLYSLSSVVTVPSSSLGTQTYICNVNHKPSNTKVDKRVEPKSCDKTHTCPPCPAPELRRGPSVFLFPPKPKDTLMISRTPEVTCVVVDVSHEDPEVKFNWYVDGVEVHNAKTKPREEQYNSTYRVVSVLTVLHQDWLNGKEYKCKVSNKGLPSSIEKTISKAKGQPREPQVYTLPPSREEMTKNQVSLTCLVKGFYPSDIAVEWESNGQPENNYKTTPPVLDSDGSFFLYSKLTVDKSRWQEGNVFSCSVMHEALHNHYTQKSLSLSP

SEQ ID NO: 363 - protein, 459 aa, Artificial Sequence
  an artificially synthesized sequence
QVQLQESGPGLVRPSQTLSLTCTVSGYSITSDHAWSWVRQPPGRGLEWIGYISYSGITSTSGRSANPRGTTYNPSLKSRVTMLRDTSKNQFSLRLSSVTAADTAVYYCARSLARTTAMDYWGQGSLVTVSSASTKGPSVFPLAPSSKSTSGGTAALGCLVKDYFPEPVTVSWNSGALTSGVHTFPAVLQSSGLYSLSSVVTVPSSSLGTQTYICNVNHKPSNTKVDKRVEPKSCDKTHTCPPCPAPELRRGPSVFLFPPKPKDTLMISRTPEVTCVVVDVSHEDPEVKFNWYVDGVEVHNAKTKPREEQYNSTYRVVSVLTVLHQDWLNGKEYKCKVSNKGLPSSIEKTISKAKGQPREPQVYTLPPSREEMTKNQVSLTCLVKGFYPSDIAVEWESNGQPENNYKTTPPVLDSDGSFFLYSKLTVDKSRWQEGNVFSCSVMHEALHNHYTQKSLSLSP

SEQ ID NO: 364 - protein, 459 aa, Artificial Sequence
  an artificially synthesized sequence
QVQLQESGPGLVRPSQTLSLTCTVSGYSITSDHAWSWVRQPPGRGLEWIGYISYSGITTSTSGRSANPRGTYNPSLKSRVTMLRDTSKNQFSLRLSSVTAADTAVYYCARSLARTTAMDYWGQGSLVTVSSASTKGPSVFPLAPSSKSTSGGTAALGCLVKDYFPEPVTVSWNSGALTSGVHTFPAVLQSSGLYSLSSVVTVPSSSLGTQTYICNVNHKPSNTKVDKRVEPKSCDKTHTCPPCPAPELRRGPSVFLFPPKPKDTLMISRTPEVTCVVVDVSHEDPEVKFNWYVDGVEVHNAKTKPREEQYNSTYRVVSVLTVLHQDWLNGKEYKCKVSNKGLPSSIEKTISKAKGQPREPQVYTLPPSREEMTKNQVSLTCLVKGFYPSDIAVEWESNGQPENNYKTTPPVLDSDGSFFLYSKLTVDKSRWQEGNVFSCSVMHEALHNHYTQKSLSLSP

SEQ ID NO: 365 - protein, 459 aa, Artificial Sequence
  an artificially synthesized sequence
QVQLQESGPGLVRPSQTLSLTCTVSGYSITSDHAWSWVRQPPGRGLEWIGYISYSGITTTSTSGRSANPRGYNPSLKSRVTMLRDTSKNQFSLRLSSVTAADTAVYYCARSLARTTAMDYWGQGSLVTVSSASTKGPSVFPLAPSSKSTSGGTAALGCLVKDYFPEPVTVSWNSGALTSGVHTFPAVLQSSGLYSLSSVVTVPSSSLGTQTYICNVNHKPSNTKVDKRVEPKSCDKTHTCPPCPAPELRRGPSVFLFPPKPKDTLMISRTPEVTCVVVDVSHEDPEVKFNWYVDGVEVHNAKTKPREEQYNSTYRVVSVLTVLHQDWLNGKEYKCKVSNKGLPSSIEKTISKAKGQPREPQVYTLPPSREEMTKNQVSLTCLVKGFYPSDIAVEWESNGQPENNYKTTPPVLDSDGSFFLYSKLTVDKSRWQEGNVFSCSVMHEALHNHYTQKSLSLSP

SEQ ID NO: 366 - protein, 459 aa, Artificial Sequence
  an artificially synthesized sequence
QVQLQESGPGLVRPSQTLSLTCTVSGYSITSDHAWSWVRQPPGRGLEWIGYISYSGITTYTSTSGRSANPRGNPSLKSRVTMLRDTSKNQFSLRLSSVTAADTAVYYCARSLARTTAMDYWGQGSLVTVSSASTKGPSVFPLAPSSKSTSGGTAALGCLVKDYFPEPVTVSWNSGALTSGVHTFPAVLQSSGLYSLSSVVTVPSSSLGTQTYICNVNHKPSNTKVDKRVEPKSCDKTHTCPPCPAPELRRGPSVFLFPPKPKDTLMISRTPEVTCVVVDVSHEDPEVKFNWYVDGVEVHNAKTKPREEQYNSTYRVVSVLTVLHQDWLNGKEYKCKVSNKGLPSSIEKTISKAKGQPREPQVYTLPPSREEMTKNQVSLTCLVKGFYPSDIAVEWESNGQPENNYKTTPPVLDSDGSFFLYSKLTVDKSRWQEGNVFSCSVMHEALHNHYTQKSLSLSP

SEQ ID NO: 367 - protein, 459 aa, Artificial Sequence
  an artificially synthesized sequence
QVQLQESGPGLVRPSQTLSLTCTVSGYSITSDHAWSWVRQPPGRGLEWIGYISYSGITTYNTSTSGRSANPRGPSLKSRVTMLRDTSKNQFSLRLSSVTAADTAVYYCARSLARTTAMDYWGQGSLVTVSSASTKGPSVFPLAPSSKSTSGGTAALGCLVKDYFPEPVTVSWNSGALTSGVHTFPAVLQSSGLYSLSSVVTVPSSSLGTQTYICNVNHKPSNTKVDKRVEPKSCDKTHTCPPCPAPELRRGPSVFLFPPKPKDTLMISRTPEVTCVVVDVSHEDPEVKFNWYVDGVEVHNAKTKPREEQYNSTYRVVSVLTVLHQDWLNGKEYKCKVSNKGLPSSIEKTISKAKGQPREPQVYTLPPSREEMTKNQVSLTCLVKGFYPSDIAVEWESNGQPENNYKTTPPVLDSDGSFFLYSKLTVDKSRWQEGNVFSCSVMHEALHNHYTQKSLSLSP

SEQ ID NO: 368 - protein, 459 aa, Artificial Sequence
  an artificially synthesized sequence
QVQLQESGPGLVRPSQTLSLTCTVSGYSITSDHAWSWVRQPPGRGLEWIGYISYSGITTYNPTSTSGRSANPRGSLKSRVTMLRDTSKNQFSLRLSSVTAADTAVYYCARSLARTTAMDYWGQGSLVTVSSASTKGPSVFPLAPSSKSTSGGTAALGCLVKDYFPEPVTVSWNSGALTSGVHTFPAVLQSSGLYSLSSVVTVPSSSLGTQTYICNVNHKPSNTKVDKRVEPKSCDKTHTCPPCPAPELRRGPSVFLFPPKPKDTLMISRTPEVTCVVVDVSHEDPEVKFNWYVDGVEVHNAKTKPREEQYNSTYRVVSVLTVLHQDWLNGKEYKCKVSNKGLPSSIEKTISKAKGQPREPQVYTLPPSREEMTKNQVSLTCLVKGFYPSDIAVEWESNGQPENNYKTTPPVLDSDGSFFLYSKLTVDKSRWQEGNVFSCSVMHEALHNHYTQKSLSLSP

SEQ ID NO: 369 - protein, 459 aa, Artificial Sequence
  an artificially synthesized sequence
QVQLQESGPGLVRPSQTLSLTCTVSGYSITSDHAWSWVRQPPGRGLEWIGYISYSGITTYNPSTSTSGRSANPRGLKSRVTMLRDTSKNQFSLRLSSVTAADTAVYYCARSLARTTAMDYWGQGSLVTVSSASTKGPSVFPLAPSSKSTSGGTAALGCLVKDYFPEPVTVSWNSGALTSGVHTFPAVLQSSGLYSLSSVVTVPSSSLGTQTYICNVNHKPSNTKVDKRVEPKSCDKTHTCPPCPAPELRRGPSVFLFPPKPKDTLMISRTPEVTCVVVDVSHEDPEVKFNWYVDGVEVHNAKTKPREEQYNSTYRVVSVLTVLHQDWLNGKEYKCKVSNKGLPSSIEKTISKAKGQPREPQVYTLPPSREEMTKNQVSLTCLVKGFYPSDIAVEWESNGQPENNYKTTPPVLDSDGSFFLYSKLTVDKSRWQEGNVFSCSVMHEALHNHYTQKSLSLSP

SEQ ID NO: 370 - protein, 459 aa, Artificial Sequence
  an artificially synthesized sequence
QVQLQESGPGLVRPSQTLSLTCTVSGYSITSDHAWSWVRQPPGRGLEWIGYISYSGITTYNPSLTSTSGRSANPRGKSRVTMLRDTSKNQFSLRLSSVTAADTAVYYCARSLARTTAMDYWGQGSLVTVSSASTKGPSVFPLAPSSKSTSGGTAALGCLVKDYFPEPVTVSWNSGALTSGVHTFPAVLQSSGLYSLSSVVTVPSSSLGTQTYICNVNHKPSNTKVDKRVEPKSCDKTHTCPPCPAPELRRGPSVFLFPPKPKDTLMISRTPEVTCVVVDVSHEDPEVKFNWYVDGVEVHNAKTKPREEQYNSTYRVVSVLTVLHQDWLNGKEYKCKVSNKGLPSSIEKTISKAKGQPREPQVYTLPPSREEMTKNQVSLTCLVKGFYPSDIAVEWESNGQPENNYKTTPPVLDSDGSFFLYSKLTVDKSRWQEGNVFSCSVMHEALHNHYTQKSLSLSP

SEQ ID NO: 371 - protein, 459 aa, Artificial Sequence
  an artificially synthesized sequence
QVQLQESGPGLVRPSQTLSLTCTVSGYSITSDHAWSWVRQPPGRGLEWIGYISYSGITTYNPSLKTSTSGRSANPRGSRVTMLRDTSKNQFSLRLSSVTAADTAVYYCARSLARTTAMDYWGQGSLVTVSSASTKGPSVFPLAPSSKSTSGGTAALGCLVKDYFPEPVTVSWNSGALTSGVHTFPAVLQSSGLYSLSSVVTVPSSSLGTQTYICNVNHKPSNTKVDKRVEPKSCDKTHTCPPCPAPELRRGPSVFLFPPKPKDTLMISRTPEVTCVVVDVSHEDPEVKFNWYVDGVEVHNAKTKPREEQYNSTYRVVSVLTVLHQDWLNGKEYKCKVSNKGLPSSIEKTISKAKGQPREPQVYTLPPSREEMTKNQVSLTCLVKGFYPSDIAVEWESNGQPENNYKTTPPVLDSDGSFFLYSKLTVDKSRWQEGNVFSCSVMHEALHNHYTQKSLSLSP

SEQ ID NO: 372 - protein, 459 aa, Artificial Sequence
  an artificially synthesized sequence
QVQLQESGPGLVRPSQTLSLTCTVSGYSITSDHAWSWVRQPPGRGLEWIGYISYSGITTYNPSLKSTSTSGRSANPRGRVTMLRDTSKNQFSLRLSSVTAADTAVYYCARSLARTTAMDYWGQGSLVTVSSASTKGPSVFPLAPSSKSTSGGTAALGCLVKDYFPEPVTVSWNSGALTSGVHTFPAVLQSSGLYSLSSVVTVPSSSLGTQTYICNVNHKPSNTKVDKRVEPKSCDKTHTCPPCPAPELRRGPSVFLFPPKPKDTLMISRTPEVTCVVVDVSHEDPEVKFNWYVDGVEVHNAKTKPREEQYNSTYRVVSVLTVLHQDWLNGKEYKCKVSNKGLPSSIEKTISKAKGQPREPQVYTLPPSREEMTKNQVSLTCLVKGFYPSDIAVEWESNGQPENNYKTTPPVLDSDGSFFLYSKLTVDKSRWQEGNVFSCSVMHEALHNHYTQKSLSLSP

SEQ ID NO: 373 - protein, 459 aa, Artificial Sequence
  an artificially synthesized sequence
QVQLQESGPGLVRPSQTLSLTCTVSGYSITSDHAWSWVRQPPGRGLEWIGYISYSGITTYNPSLKSRTSTSGRSANPRGVTMLRDTSKNQFSLRLSSVTAADTAVYYCARSLARTTAMDYWGQGSLVTVSSASTKGPSVFPLAPSSKSTSGGTAALGCLVKDYFPEPVTVSWNSGALTSGVHTFPAVLQSSGLYSLSSVVTVPSSSLGTQTYICNVNHKPSNTKVDKRVEPKSCDKTHTCPPCPAPELRRGPSVFLFPPKPKDTLMISRTPEVTCVVVDVSHEDPEVKFNWYVDGVEVHNAKTKPREEQYNSTYRVVSVLTVLHQDWLNGKEYKCKVSNKGLPSSIEKTISKAKGQPREPQVYTLPPSREEMTKNQVSLTCLVKGFYPSDIAVEWESNGQPENNYKTTPPVLDSDGSFFLYSKLTVDKSRWQEGNVFSCSVMHEALHNHYTQKSLSLSP

SEQ ID NO: 374 - protein, 459 aa, Artificial Sequence
  an artificially synthesized sequence
QVQLQESGPGLVRPSQTLSLTCTVSGYSITSDHAWSWVRQPPGRGLEWIGYISYSGITTYNPSLKSRVTSTSGRSANPRGTMLRDTSKNQFSLRLSSVTAADTAVYYCARSLARTTAMDYWGQGSLVTVSSASTKGPSVFPLAPSSKSTSGGTAALGCLVKDYFPEPVTVSWNSGALTSGVHTFPAVLQSSGLYSLSSVVTVPSSSLGTQTYICNVNHKPSNTKVDKRVEPKSCDKTHTCPPCPAPELRRGPSVFLFPPKPKDTLMISRTPEVTCVVVDVSHEDPEVKFNWYVDGVEVHNAKTKPREEQYNSTYRVVSVLTVLHQDWLNGKEYKCKVSNKGLPSSIEKTISKAKGQPREPQVYTLPPSREEMTKNQVSLTCLVKGFYPSDIAVEWESNGQPENNYKTTPPVLDSDGSFFLYSKLTVDKSRWQEGNVFSCSVMHEALHNHYTQKSLSLSP

SEQ ID NO: 375 - protein, 459 aa, Artificial Sequence
  an artificially synthesized sequence
QVQLQESGPGLVRPSQTLSLTCTVSGYSITSDHAWSWVRQPPGRGLEWIGYISYSGITTYNPSLKSRVTTSTSGRSANPRGMLRDTSKNQFSLRLSSVTAADTAVYYCARSLARTTAMDYWGQGSLVTVSSASTKGPSVFPLAPSSKSTSGGTAALGCLVKDYFPEPVTVSWNSGALTSGVHTFPAVLQSSGLYSLSSVVTVPSSSLGTQTYICNVNHKPSNTKVDKRVEPKSCDKTHTCPPCPAPELRRGPSVFLFPPKPKDTLMISRTPEVTCVVVDVSHEDPEVKFNWYVDGVEVHNAKTKPREEQYNSTYRVVSVLTVLHQDWLNGKEYKCKVSNKGLPSSIEKTISKAKGQPREPQVYTLPPSREEMTKNQVSLTCLVKGFYPSDIAVEWESNGQPENNYKTTPPVLDSDGSFFLYSKLTVDKSRWQEGNVFSCSVMHEALHNHYTQKSLSLSP

SEQ ID NO: 376 - protein, 459 aa, Artificial Sequence
  an artificially synthesized sequence
QVQLQESGPGLVRPSQTLSLTCTVSGYSITSDHAWSWVRQPPGRGLEWIGYISYSGITTYNPSLKSRVTMLRDTTSTSGRSANPRGSKNQFSLRLSSVTAADTAVYYCARSLARTTAMDYWGQGSLVTVSSASTKGPSVFPLAPSSKSTSGGTAALGCLVKDYFPEPVTVSWNSGALTSGVHTFPAVLQSSGLYSLSSVVTVPSSSLGTQTYICNVNHKPSNTKVDKRVEPKSCDKTHTCPPCPAPELRRGPSVFLFPPKPKDTLMISRTPEVTCVVVDVSHEDPEVKFNWYVDGVEVHNAKTKPREEQYNSTYRVVSVLTVLHQDWLNGKEYKCKVSNKGLPSSIEKTISKAKGQPREPQVYTLPPSREEMTKNQVSLTCLVKGFYPSDIAVEWESNGQPENNYKTTPPVLDSDGSFFLYSKLTVDKSRWQEGNVFSCSVMHEALHNHYTQKSLSLSP

SEQ ID NO: 377 - protein, 459 aa, Artificial Sequence
  an artificially synthesized sequence
QVQLQESGPGLVRPSQTLSLTCTVSGYSITSDHAWSWVRQPPGRGLEWIGYISYSGITTYNPSLKSRVTMLRDTSTSTSGRSANPRGKNQFSLRLSSVTAADTAVYYCARSLARTTAMDYWGQGSLVTVSSASTKGPSVFPLAPSSKSTSGGTAALGCLVKDYFPEPVTVSWNSGALTSGVHTFPAVLQSSGLYSLSSVVTVPSSSLGTQTYICNVNHKPSNTKVDKRVEPKSCDKTHTCPPCPAPELRRGPSVFLFPPKPKDTLMISRTPEVTCVVVDVSHEDPEVKFNWYVDGVEVHNAKTKPREEQYNSTYRVVSVLTVLHQDWLNGKEYKCKVSNKGLPSSIEKTISKAKGQPREPQVYTLPPSREEMTKNQVSLTCLVKGFYPSDIAVEWESNGQPENNYKTTPPVLDSDGSFFLYSKLTVDKSRWQEGNVFSCSVMHEALHNHYTQKSLSLSP

SEQ ID NO: 378 - protein, 459 aa, Artificial Sequence
  an artificially synthesized sequence
QVQLQESGPGLVRPSQTLSLTCTVSGYSITSDHAWSWVRQPPGRGLEWIGYISYSGITTYNPSLKSRVTMLRDTSKTSTSGRSANPRGNQFSLRLSSVTAADTAVYYCARSLARTTAMDYWGQGSLVTVSSASTKGPSVFPLAPSSKSTSGGTAALGCLVKDYFPEPVTVSWNSGALTSGVHTFPAVLQSSGLYSLSSVVTVPSSSLGTQTYICNVNHKPSNTKVDKRVEPKSCDKTHTCPPCPAPELRRGPSVFLFPPKPKDTLMISRTPEVTCVVVDVSHEDPEVKFNWYVDGVEVHNAKTKPREEQYNSTYRVVSVLTVLHQDWLNGKEYKCKVSNKGLPSSIEKTISKAKGQPREPQVYTLPPSREEMTKNQVSLTCLVKGFYPSDIAVEWESNGQPENNYKTTPPVLDSDGSFFLYSKLTVDKSRWQEGNVFSCSVMHEALHNHYTQKSLSLSP

SEQ ID NO: 379 - protein, 459 aa, Artificial Sequence
  an artificially synthesized sequence
QVQLQESGPGLVRPSQTLSLTCTVSGYSITSDHAWSWVRQPPGRGLEWIGYISYSGITTYNPSLKSRVTMLRDTSKNTSTSGRSANPRGQFSLRLSSVTAADTAVYYCARSLARTTAMDYWGQGSLVTVSSASTKGPSVFPLAPSSKSTSGGTAALGCLVKDYFPEPVTVSWNSGALTSGVHTFPAVLQSSGLYSLSSVVTVPSSSLGTQTYICNVNHKPSNTKVDKRVEPKSCDKTHTCPPCPAPELRRGPSVFLFPPKPKDTLMISRTPEVTCVVVDVSHEDPEVKFNWYVDGVEVHNAKTKPREEQYNSTYRVVSVLTVLHQDWLNGKEYKCKVSNKGLPSSIEKTISKAKGQPREPQVYTLPPSREEMTKNQVSLTCLVKGFYPSDIAVEWESNGQPENNYKTTPPVLDSDGSFFLYSKLTVDKSRWQEGNVFSCSVMHEALHNHYTQKSLSLSP

SEQ ID NO: 380 - protein, 459 aa, Artificial Sequence
  an artificially synthesized sequence
QVQLQESGPGLVRPSQTLSLTCTVSGYSITSDHAWSWVRQPPGRGLEWIGYISYSGITTYNPSLKSRVTMLRDTSKNQTSTSGRSANPRGFSLRLSSVTAADTAVYYCARSLARTTAMDYWGQGSLVTVSSASTKGPSVFPLAPSSKSTSGGTAALGCLVKDYFPEPVTVSWNSGALTSGVHTFPAVLQSSGLYSLSSVVTVPSSSLGTQTYICNVNHKPSNTKVDKRVEPKSCDKTHTCPPCPAPELRRGPSVFLFPPKPKDTLMISRTPEVTCVVVDVSHEDPEVKFNWYVDGVEVHNAKTKPREEQYNSTYRVVSVLTVLHQDWLNGKEYKCKVSNKGLPSSIEKTISKAKGQPREPQVYTLPPSREEMTKNQVSLTCLVKGFYPSDIAVEWESNGQPENNYKTTPPVLDSDGSFFLYSKLTVDKSRWQEGNVFSCSVMHEALHNHYTQKSLSLSP

SEQ ID NO: 381 - protein, 459 aa, Artificial Sequence
  an artificially synthesized sequence
QVQLQESGPGLVRPSQTLSLTCTVSGYSITSDHAWSWVRQPPGRGLEWIGYISYSGITTYNPSLKSRVTMLRDTSKNQFSLRLSSVTTSTSGRSANPRGAADTAVYYCARSLARTTAMDYWGQGSLVTVSSASTKGPSVFPLAPSSKSTSGGTAALGCLVKDYFPEPVTVSWNSGALTSGVHTFPAVLQSSGLYSLSSVVTVPSSSLGTQTYICNVNHKPSNTKVDKRVEPKSCDKTHTCPPCPAPELRRGPSVFLFPPKPKDTLMISRTPEVTCVVVDVSHEDPEVKFNWYVDGVEVHNAKTKPREEQYNSTYRVVSVLTVLHQDWLNGKEYKCKVSNKGLPSSIEKTISKAKGQPREPQVYTLPPSREEMTKNQVSLTCLVKGFYPSDIAVEWESNGQPENNYKTTPPVLDSDGSFFLYSKLTVDKSRWQEGNVFSCSVMHEALHNHYTQKSLSLSP

SEQ ID NO: 382 - protein, 459 aa, Artificial Sequence
  an artificially synthesized sequence
QVQLQESGPGLVRPSQTLSLTCTVSGYSITSDHAWSWVRQPPGRGLEWIGYISYSGITTYNPSLKSRVTMLRDTSKNQFSLRLSSVTATSTSGRSANPRGADTAVYYCARSLARTTAMDYWGQGSLVTVSSASTKGPSVFPLAPSSKSTSGGTAALGCLVKDYFPEPVTVSWNSGALTSGVHTFPAVLQSSGLYSLSSVVTVPSSSLGTQTYICNVNHKPSNTKVDKRVEPKSCDKTHTCPPCPAPELRRGPSVFLFPPKPKDTLMISRTPEVTCVVVDVSHEDPEVKFNWYVDGVEVHNAKTKPREEQYNSTYRVVSVLTVLHQDWLNGKEYKCKVSNKGLPSSIEKTISKAKGQPREPQVYTLPPSREEMTKNQVSLTCLVKGFYPSDIAVEWESNGQPENNYKTTPPVLDSDGSFFLYSKLTVDKSRWQEGNVFSCSVMHEALHNHYTQKSLSLSP

SEQ ID NO: 383 - protein, 459 aa, Artificial Sequence
  an artificially synthesized sequence
QVQLQESGPGLVRPSQTLSLTCTVSGYSITSDHAWSWVRQPPGRGLEWIGYISYSGITTYNPSLKSRVTMLRDTSKNQFSLRLSSVTAATSTSGRSANPRGDTAVYYCARSLARTTAMDYWGQGSLVTVSSASTKGPSVFPLAPSSKSTSGGTAALGCLVKDYFPEPVTVSWNSGALTSGVHTFPAVLQSSGLYSLSSVVTVPSSSLGTQTYICNVNHKPSNTKVDKRVEPKSCDKTHTCPPCPAPELRRGPSVFLFPPKPKDTLMISRTPEVTCVVVDVSHEDPEVKFNWYVDGVEVHNAKTKPREEQYNSTYRVVSVLTVLHQDWLNGKEYKCKVSNKGLPSSIEKTISKAKGQPREPQVYTLPPSREEMTKNQVSLTCLVKGFYPSDIAVEWESNGQPENNYKTTPPVLDSDGSFFLYSKLTVDKSRWQEGNVFSCSVMHEALHNHYTQKSLSLSP

SEQ ID NO: 384 - protein, 459 aa, Artificial Sequence
  an artificially synthesized sequence
QVQLQESGPGLVRPSQTLSLTCTVSGYSITSDHAWSWVRQPPGRGLEWIGYISYSGITTYNPSLKSRVTMLRDTSKNQFSLRLSSVTAADTAVYYCARSTSTSGRSANPRGLARTTAMDYWGQGSLVTVSSASTKGPSVFPLAPSSKSTSGGTAALGCLVKDYFPEPVTVSWNSGALTSGVHTFPAVLQSSGLYSLSSVVTVPSSSLGTQTYICNVNHKPSNTKVDKRVEPKSCDKTHTCPPCPAPELRRGPSVFLFPPKPKDTLMISRTPEVTCVVVDVSHEDPEVKFNWYVDGVEVHNAKTKPREEQYNSTYRVVSVLTVLHQDWLNGKEYKCKVSNKGLPSSIEKTISKAKGQPREPQVYTLPPSREEMTKNQVSLTCLVKGFYPSDIAVEWESNGQPENNYKTTPPVLDSDGSFFLYSKLTVDKSRWQEGNVFSCSVMHEALHNHYTQKSLSLSP

SEQ ID NO: 385 - protein, 459 aa, Artificial Sequence
  an artificially synthesized sequence
QVQLQESGPGLVRPSQTLSLTCTVSGYSITSDHAWSWVRQPPGRGLEWIGYISYSGITTYNPSLKSRVTMLRDTSKNQFSLRLSSVTAADTAVYYCARSLTSTSGRSANPRGARTTAMDYWGQGSLVTVSSASTKGPSVFPLAPSSKSTSGGTAALGCLVKDYFPEPVTVSWNSGALTSGVHTFPAVLQSSGLYSLSSVVTVPSSSLGTQTYICNVNHKPSNTKVDKRVEPKSCDKTHTCPPCPAPELRRGPSVFLFPPKPKDTLMISRTPEVTCVVVDVSHEDPEVKFNWYVDGVEVHNAKTKPREEQYNSTYRVVSVLTVLHQDWLNGKEYKCKVSNKGLPSSIEKTISKAKGQPREPQVYTLPPSREEMTKNQVSLTCLVKGFYPSDIAVEWESNGQPENNYKTTPPVLDSDGSFFLYSKLTVDKSRWQEGNVFSCSVMHEALHNHYTQKSLSLSP

SEQ ID NO: 386 - protein, 459 aa, Artificial Sequence
  an artificially synthesized sequence
QVQLQESGPGLVRPSQTLSLTCTVSGYSITSDHAWSWVRQPPGRGLEWIGYISYSGITTYNPSLKSRVTMLRDTSKNQFSLRLSSVTAADTAVYYCARSLATSTSGRSANPRGRTTAMDYWGQGSLVTVSSASTKGPSVFPLAPSSKSTSGGTAALGCLVKDYFPEPVTVSWNSGALTSGVHTFPAVLQSSGLYSLSSVVTVPSSSLGTQTYICNVNHKPSNTKVDKRVEPKSCDKTHTCPPCPAPELRRGPSVFLFPPKPKDTLMISRTPEVTCVVVDVSHEDPEVKFNWYVDGVEVHNAKTKPREEQYNSTYRVVSVLTVLHQDWLNGKEYKCKVSNKGLPSSIEKTISKAKGQPREPQVYTLPPSREEMTKNQVSLTCLVKGFYPSDIAVEWESNGQPENNYKTTPPVLDSDGSFFLYSKLTVDKSRWQEGNVFSCSVMHEALHNHYTQKSLSLSP

SEQ ID NO: 387 - protein, 459 aa, Artificial Sequence
  an artificially synthesized sequence
QVQLQESGPGLVRPSQTLSLTCTVSGYSITSDHAWSWVRQPPGRGLEWIGYISYSGITTYNPSLKSRVTMLRDTSKNQFSLRLSSVTAADTAVYYCARSLARTSTSGRSANPRGTTAMDYWGQGSLVTVSSASTKGPSVFPLAPSSKSTSGGTAALGCLVKDYFPEPVTVSWNSGALTSGVHTFPAVLQSSGLYSLSSVVTVPSSSLGTQTYICNVNHKPSNTKVDKRVEPKSCDKTHTCPPCPAPELRRGPSVFLFPPKPKDTLMISRTPEVTCVVVDVSHEDPEVKFNWYVDGVEVHNAKTKPREEQYNSTYRVVSVLTVLHQDWLNGKEYKCKVSNKGLPSSIEKTISKAKGQPREPQVYTLPPSREEMTKNQVSLTCLVKGFYPSDIAVEWESNGQPENNYKTTPPVLDSDGSFFLYSKLTVDKSRWQEGNVFSCSVMHEALHNHYTQKSLSLSP

SEQ ID NO: 388 - protein, 459 aa, Artificial Sequence
  an artificially synthesized sequence
QVQLQESGPGLVRPSQTLSLTCTVSGYSITSDHAWSWVRQPPGRGLEWIGYISYSGITTYNPSLKSRVTMLRDTSKNQFSLRLSSVTAADTAVYYCARSLARTTAMDYWTSTSGRSANPRGGQGSLVTVSSASTKGPSVFPLAPSSKSTSGGTAALGCLVKDYFPEPVTVSWNSGALTSGVHTFPAVLQSSGLYSLSSVVTVPSSSLGTQTYICNVNHKPSNTKVDKRVEPKSCDKTHTCPPCPAPELRRGPSVFLFPPKPKDTLMISRTPEVTCVVVDVSHEDPEVKFNWYVDGVEVHNAKTKPREEQYNSTYRVVSVLTVLHQDWLNGKEYKCKVSNKGLPSSIEKTISKAKGQPREPQVYTLPPSREEMTKNQVSLTCLVKGFYPSDIAVEWESNGQPENNYKTTPPVLDSDGSFFLYSKLTVDKSRWQEGNVFSCSVMHEALHNHYTQKSLSLSP

SEQ ID NO: 389 - protein, 459 aa, Artificial Sequence
  an artificially synthesized sequence
QVQLQESGPGLVRPSQTLSLTCTVSGYSITSDHAWSWVRQPPGRGLEWIGYISYSGITTYNPSLKSRVTMLRDTSKNQFSLRLSSVTAADTAVYYCARSLARTTAMDYWGTSTSGRSANPRGQGSLVTVSSASTKGPSVFPLAPSSKSTSGGTAALGCLVKDYFPEPVTVSWNSGALTSGVHTFPAVLQSSGLYSLSSVVTVPSSSLGTQTYICNVNHKPSNTKVDKRVEPKSCDKTHTCPPCPAPELRRGPSVFLFPPKPKDTLMISRTPEVTCVVVDVSHEDPEVKFNWYVDGVEVHNAKTKPREEQYNSTYRVVSVLTVLHQDWLNGKEYKCKVSNKGLPSSIEKTISKAKGQPREPQVYTLPPSREEMTKNQVSLTCLVKGFYPSDIAVEWESNGQPENNYKTTPPVLDSDGSFFLYSKLTVDKSRWQEGNVFSCSVMHEALHNHYTQKSLSLSP

SEQ ID NO: 390 - protein, 459 aa, Artificial Sequence
  an artificially synthesized sequence
QVQLQESGPGLVRPSQTLSLTCTVSGYSITSDHAWSWVRQPPGRGLEWIGYISYSGITTYNPSLKSRVTMLRDTSKNQFSLRLSSVTAADTAVYYCARSLARTTAMDYWGQTSTSGRSANPRGGSLVTVSSASTKGPSVFPLAPSSKSTSGGTAALGCLVKDYFPEPVTVSWNSGALTSGVHTFPAVLQSSGLYSLSSVVTVPSSSLGTQTYICNVNHKPSNTKVDKRVEPKSCDKTHTCPPCPAPELRRGPSVFLFPPKPKDTLMISRTPEVTCVVVDVSHEDPEVKFNWYVDGVEVHNAKTKPREEQYNSTYRVVSVLTVLHQDWLNGKEYKCKVSNKGLPSSIEKTISKAKGQPREPQVYTLPPSREEMTKNQVSLTCLVKGFYPSDIAVEWESNGQPENNYKTTPPVLDSDGSFFLYSKLTVDKSRWQEGNVFSCSVMHEALHNHYTQKSLSLSP

SEQ ID NO: 391 - protein, 459 aa, Artificial Sequence
  an artificially synthesized sequence
QVQLQESGPGLVRPSQTLSLTCTVSGYSITSDHAWSWVRQPPGRGLEWIGYISYSGITTYNPSLKSRVTMLRDTSKNQFSLRLSSVTAADTAVYYCARSLARTTAMDYWGQGTSTSGRSANPRGSLVTVSSASTKGPSVFPLAPSSKSTSGGTAALGCLVKDYFPEPVTVSWNSGALTSGVHTFPAVLQSSGLYSLSSVVTVPSSSLGTQTYICNVNHKPSNTKVDKRVEPKSCDKTHTCPPCPAPELRRGPSVFLFPPKPKDTLMISRTPEVTCVVVDVSHEDPEVKFNWYVDGVEVHNAKTKPREEQYNSTYRVVSVLTVLHQDWLNGKEYKCKVSNKGLPSSIEKTISKAKGQPREPQVYTLPPSREEMTKNQVSLTCLVKGFYPSDIAVEWESNGQPENNYKTTPPVLDSDGSFFLYSKLTVDKSRWQEGNVFSCSVMHEALHNHYTQKSLSLSP

SEQ ID NO: 392 - protein, 459 aa, Artificial Sequence
  an artificially synthesized sequence
QVQLQESGPGLVRPSQTLSLTCTVSGYSITSDHAWSWVRQPPGRGLEWIGYISYSGITTYNPSLKSRVTMLRDTSKNQFSLRLSSVTAADTAVYYCARSLARTTAMDYWGQGSTSTSGRSANPRGLVTVSSASTKGPSVFPLAPSSKSTSGGTAALGCLVKDYFPEPVTVSWNSGALTSGVHTFPAVLQSSGLYSLSSVVTVPSSSLGTQTYICNVNHKPSNTKVDKRVEPKSCDKTHTCPPCPAPELRRGPSVFLFPPKPKDTLMISRTPEVTCVVVDVSHEDPEVKFNWYVDGVEVHNAKTKPREEQYNSTYRVVSVLTVLHQDWLNGKEYKCKVSNKGLPSSIEKTISKAKGQPREPQVYTLPPSREEMTKNQVSLTCLVKGFYPSDIAVEWESNGQPENNYKTTPPVLDSDGSFFLYSKLTVDKSRWQEGNVFSCSVMHEALHNHYTQKSLSLSP

SEQ ID NO: 393 - protein, 459 aa, Artificial Sequence
  an artificially synthesized sequence
QVQLQESGPGLVRPSQTLSLTCTVSGYSITSDHAWSWVRQPPGRGLEWIGYISYSGITTYNPSLKSRVTMLRDTSKNQFSLRLSSVTAADTAVYYCARSLARTTAMDYWGQGSLTSTSGRSANPRGVTVSSASTKGPSVFPLAPSSKSTSGGTAALGCLVKDYFPEPVTVSWNSGALTSGVHTFPAVLQSSGLYSLSSVVTVPSSSLGTQTYICNVNHKPSNTKVDKRVEPKSCDKTHTCPPCPAPELRRGPSVFLFPPKPKDTLMISRTPEVTCVVVDVSHEDPEVKFNWYVDGVEVHNAKTKPREEQYNSTYRVVSVLTVLHQDWLNGKEYKCKVSNKGLPSSIEKTISKAKGQPREPQVYTLPPSREEMTKNQVSLTCLVKGFYPSDIAVEWESNGQPENNYKTTPPVLDSDGSFFLYSKLTVDKSRWQEGNVFSCSVMHEALHNHYTQKSLSLSP

SEQ ID NO: 394 - protein, 459 aa, Artificial Sequence
  an artificially synthesized sequence
QVQLQESGPGLVRPSQTLSLTCTVSGYSITSDHAWSWVRQPPGRGLEWIGYISYSGITTYNPSLKSRVTMLRDTSKNQFSLRLSSVTAADTAVYYCARSLARTTAMDYWGQGSLVTSTSGRSANPRGTVSSASTKGPSVFPLAPSSKSTSGGTAALGCLVKDYFPEPVTVSWNSGALTSGVHTFPAVLQSSGLYSLSSVVTVPSSSLGTQTYICNVNHKPSNTKVDKRVEPKSCDKTHTCPPCPAPELRRGPSVFLFPPKPKDTLMISRTPEVTCVVVDVSHEDPEVKFNWYVDGVEVHNAKTKPREEQYNSTYRVVSVLTVLHQDWLNGKEYKCKVSNKGLPSSIEKTISKAKGQPREPQVYTLPPSREEMTKNQVSLTCLVKGFYPSDIAVEWESNGQPENNYKTTPPVLDSDGSFFLYSKLTVDKSRWQEGNVFSCSVMHEALHNHYTQKSLSLSP

SEQ ID NO: 395 - protein, 459 aa, Artificial Sequence
  an artificially synthesized sequence
QVQLQESGPGLVRPSQTLSLTCTVSGYSITSDHAWSWVRQPPGRGLEWIGYISYSGITTYNPSLKSRVTMLRDTSKNQFSLRLSSVTAADTAVYYCARSLARTTAMDYWGQGSLVTTSTSGRSANPRGVSSASTKGPSVFPLAPSSKSTSGGTAALGCLVKDYFPEPVTVSWNSGALTSGVHTFPAVLQSSGLYSLSSVVTVPSSSLGTQTYICNVNHKPSNTKVDKRVEPKSCDKTHTCPPCPAPELRRGPSVFLFPPKPKDTLMISRTPEVTCVVVDVSHEDPEVKFNWYVDGVEVHNAKTKPREEQYNSTYRVVSVLTVLHQDWLNGKEYKCKVSNKGLPSSIEKTISKAKGQPREPQVYTLPPSREEMTKNQVSLTCLVKGFYPSDIAVEWESNGQPENNYKTTPPVLDSDGSFFLYSKLTVDKSRWQEGNVFSCSVMHEALHNHYTQKSLSLSP

SEQ ID NO: 396 - protein, 459 aa, Artificial Sequence
  an artificially synthesized sequence
QVQLQESGPGLVRPSQTLSLTCTVSGYSITSDHAWSWVRQPPGRGLEWIGYISYSGITTYNPSLKSRVTMLRDTSKNQFSLRLSSVTAADTAVYYCARSLARTTAMDYWGQGSLVTVTSTSGRSANPRGSSASTKGPSVFPLAPSSKSTSGGTAALGCLVKDYFPEPVTVSWNSGALTSGVHTFPAVLQSSGLYSLSSVVTVPSSSLGTQTYICNVNHKPSNTKVDKRVEPKSCDKTHTCPPCPAPELRRGPSVFLFPPKPKDTLMISRTPEVTCVVVDVSHEDPEVKFNWYVDGVEVHNAKTKPREEQYNSTYRVVSVLTVLHQDWLNGKEYKCKVSNKGLPSSIEKTISKAKGQPREPQVYTLPPSREEMTKNQVSLTCLVKGFYPSDIAVEWESNGQPENNYKTTPPVLDSDGSFFLYSKLTVDKSRWQEGNVFSCSVMHEALHNHYTQKSLSLSP

SEQ ID NO: 397 - protein, 459 aa, Artificial Sequence
  an artificially synthesized sequence
QVQLQESGPGLVRPSQTLSLTCTVSGYSITSDHAWSWVRQPPGRGLEWIGYISYSGITTYNPSLKSRVTMLRDTSKNQFSLRLSSVTAADTAVYYCARSLARTTAMDYWGQGSLVTVSTSTSGRSANPRGSASTKGPSVFPLAPSSKSTSGGTAALGCLVKDYFPEPVTVSWNSGALTSGVHTFPAVLQSSGLYSLSSVVTVPSSSLGTQTYICNVNHKPSNTKVDKRVEPKSCDKTHTCPPCPAPELRRGPSVFLFPPKPKDTLMISRTPEVTCVVVDVSHEDPEVKFNWYVDGVEVHNAKTKPREEQYNSTYRVVSVLTVLHQDWLNGKEYKCKVSNKGLPSSIEKTISKAKGQPREPQVYTLPPSREEMTKNQVSLTCLVKGFYPSDIAVEWESNGQPENNYKTTPPVLDSDGSFFLYSKLTVDKSRWQEGNVFSCSVMHEALHNHYTQKSLSLSP

SEQ ID NO: 398 - protein, 459 aa, Artificial Sequence
  an artificially synthesized sequence
QVQLQESGPGLVRPSQTLSLTCTVSGYSITSDHAWSWVRQPPGRGLEWIGYISYSGITTYNPSLKSRVTMLRDTSKNQFSLRLSSVTAADTAVYYCARSLARTTAMDYWGQGSLVTVSSTSTSGRSANPRGASTKGPSVFPLAPSSKSTSGGTAALGCLVKDYFPEPVTVSWNSGALTSGVHTFPAVLQSSGLYSLSSVVTVPSSSLGTQTYICNVNHKPSNTKVDKRVEPKSCDKTHTCPPCPAPELRRGPSVFLFPPKPKDTLMISRTPEVTCVVVDVSHEDPEVKFNWYVDGVEVHNAKTKPREEQYNSTYRVVSVLTVLHQDWLNGKEYKCKVSNKGLPSSIEKTISKAKGQPREPQVYTLPPSREEMTKNQVSLTCLVKGFYPSDIAVEWESNGQPENNYKTTPPVLDSDGSFFLYSKLTVDKSRWQEGNVFSCSVMHEALHNHYTQKSLSLSP

SEQ ID NO: 399 - protein, 459 aa, Artificial Sequence
  an artificially synthesized sequence
QVQLQESGPGLVRPSQTLSLTCTVSGYSITSDHAWSWVRQPPGRGLEWIGYISYSGITTYNPSLKSRVTMLRDTSKNQFSLRLSSVTAADTAVYYCARSLARTTAMDYWGQGSLVTVSSATSTSGRSANPRGSTKGPSVFPLAPSSKSTSGGTAALGCLVKDYFPEPVTVSWNSGALTSGVHTFPAVLQSSGLYSLSSVVTVPSSSLGTQTYICNVNHKPSNTKVDKRVEPKSCDKTHTCPPCPAPELRRGPSVFLFPPKPKDTLMISRTPEVTCVVVDVSHEDPEVKFNWYVDGVEVHNAKTKPREEQYNSTYRVVSVLTVLHQDWLNGKEYKCKVSNKGLPSSIEKTISKAKGQPREPQVYTLPPSREEMTKNQVSLTCLVKGFYPSDIAVEWESNGQPENNYKTTPPVLDSDGSFFLYSKLTVDKSRWQEGNVFSCSVMHEALHNHYTQKSLSLSP

SEQ ID NO: 400 - protein, 459 aa, Artificial Sequence
  an artificially synthesized sequence
QVQLQESGPGLVRPSQTLSLTCTVSGYSITSDHAWSWVRQPPGRGLEWIGYISYSGITTYNPSLKSRVTMLRDTSKNQFSLRLSSVTAADTAVYYCARSLARTTAMDYWGQGSLVTVSSASTSTSGRSANPRGTKGPSVFPLAPSSKSTSGGTAALGCLVKDYFPEPVTVSWNSGALTSGVHTFPAVLQSSGLYSLSSVVTVPSSSLGTQTYICNVNHKPSNTKVDKRVEPKSCDKTHTCPPCPAPELRRGPSVFLFPPKPKDTLMISRTPEVTCVVVDVSHEDPEVKFNWYVDGVEVHNAKTKPREEQYNSTYRVVSVLTVLHQDWLNGKEYKCKVSNKGLPSSIEKTISKAKGQPREPQVYTLPPSREEMTKNQVSLTCLVKGFYPSDIAVEWESNGQPENNYKTTPPVLDSDGSFFLYSKLTVDKSRWQEGNVFSCSVMHEALHNHYTQKSLSLSP

SEQ ID NO: 401 - protein, 459 aa, Artificial Sequence
  an artificially synthesized sequence
QVQLQESGPGLVRPSQTLSLTCTVSGYSITSDHAWSWVRQPPGRGLEWIGYISYSGITTYNPSLKSRVTMLRDTSKNQFSLRLSSVTAADTAVYYCARSLARTTAMDYWGQGSLVTVSSASTTSTSGRSANPRGKGPSVFPLAPSSKSTSGGTAALGCLVKDYFPEPVTVSWNSGALTSGVHTFPAVLQSSGLYSLSSVVTVPSSSLGTQTYICNVNHKPSNTKVDKRVEPKSCDKTHTCPPCPAPELRRGPSVFLFPPKPKDTLMISRTPEVTCVVVDVSHEDPEVKFNWYVDGVEVHNAKTKPREEQYNSTYRVVSVLTVLHQDWLNGKEYKCKVSNKGLPSSIEKTISKAKGQPREPQVYTLPPSREEMTKNQVSLTCLVKGFYPSDIAVEWESNGQPENNYKTTPPVLDSDGSFFLYSKLTVDKSRWQEGNVFSCSVMHEALHNHYTQKSLSLSP

SEQ ID NO: 402 - protein, 459 aa, Artificial Sequence
  an artificially synthesized sequence
QVQLQESGPGLVRPSQTLSLTCTVSGYSITSDHAWSWVRQPPGRGLEWIGYISYSGITTYNPSLKSRVTMLRDTSKNQFSLRLSSVTAADTAVYYCARSLARTTAMDYWGQGSLVTVSSASTKTSTSGRSANPRGGPSVFPLAPSSKSTSGGTAALGCLVKDYFPEPVTVSWNSGALTSGVHTFPAVLQSSGLYSLSSVVTVPSSSLGTQTYICNVNHKPSNTKVDKRVEPKSCDKTHTCPPCPAPELRRGPSVFLFPPKPKDTLMISRTPEVTCVVVDVSHEDPEVKFNWYVDGVEVHNAKTKPREEQYNSTYRVVSVLTVLHQDWLNGKEYKCKVSNKGLPSSIEKTISKAKGQPREPQVYTLPPSREEMTKNQVSLTCLVKGFYPSDIAVEWESNGQPENNYKTTPPVLDSDGSFFLYSKLTVDKSRWQEGNVFSCSVMHEALHNHYTQKSLSLSP

SEQ ID NO: 403 - protein, 459 aa, Artificial Sequence
  an artificially synthesized sequence
QVQLQESGPGLVRPSQTLSLTCTVSGYSITSDHAWSWVRQPPGRGLEWIGYISYSGITTYNPSLKSRVTMLRDTSKNQFSLRLSSVTAADTAVYYCARSLARTTAMDYWGQGSLVTVSSASTKGTSTSGRSANPRGPSVFPLAPSSKSTSGGTAALGCLVKDYFPEPVTVSWNSGALTSGVHTFPAVLQSSGLYSLSSVVTVPSSSLGTQTYICNVNHKPSNTKVDKRVEPKSCDKTHTCPPCPAPELRRGPSVFLFPPKPKDTLMISRTPEVTCVVVDVSHEDPEVKFNWYVDGVEVHNAKTKPREEQYNSTYRVVSVLTVLHQDWLNGKEYKCKVSNKGLPSSIEKTISKAKGQPREPQVYTLPPSREEMTKNQVSLTCLVKGFYPSDIAVEWESNGQPENNYKTTPPVLDSDGSFFLYSKLTVDKSRWQEGNVFSCSVMHEALHNHYTQKSLSLSP

SEQ ID NO: 404 - protein, 459 aa, Artificial Sequence
  an artificially synthesized sequence
QVQLQESGPGLVRPSQTLSLTCTVSGYSITSDHAWSWVRQPPGRGLEWIGYISYSGITTYNPSLKSRVTMLRDTSKNQFSLRLSSVTAADTAVYYCARSLARTTAMDYWGQGSLVTVSSASTKGPTSTSGRSANPRGSVFPLAPSSKSTSGGTAALGCLVKDYFPEPVTVSWNSGALTSGVHTFPAVLQSSGLYSLSSVVTVPSSSLGTQTYICNVNHKPSNTKVDKRVEPKSCDKTHTCPPCPAPELRRGPSVFLFPPKPKDTLMISRTPEVTCVVVDVSHEDPEVKFNWYVDGVEVHNAKTKPREEQYNSTYRVVSVLTVLHQDWLNGKEYKCKVSNKGLPSSIEKTISKAKGQPREPQVYTLPPSREEMTKNQVSLTCLVKGFYPSDIAVEWESNGQPENNYKTTPPVLDSDGSFFLYSKLTVDKSRWQEGNVFSCSVMHEALHNHYTQKSLSLSP

SEQ ID NO: 405 - protein, 459 aa, Artificial Sequence
  an artificially synthesized sequence
QVQLQESGPGLVRPSQTLSLTCTVSGYSITSDHAWSWVRQPPGRGLEWIGYISYSGITTYNPSLKSRVTMLRDTSKNQFSLRLSSVTAADTAVYYCARSLARTTAMDYWGQGSLVTVSSASTKGPSTSTSGRSANPRGVFPLAPSSKSTSGGTAALGCLVKDYFPEPVTVSWNSGALTSGVHTFPAVLQSSGLYSLSSVVTVPSSSLGTQTYICNVNHKPSNTKVDKRVEPKSCDKTHTCPPCPAPELRRGPSVFLFPPKPKDTLMISRTPEVTCVVVDVSHEDPEVKFNWYVDGVEVHNAKTKPREEQYNSTYRVVSVLTVLHQDWLNGKEYKCKVSNKGLPSSIEKTISKAKGQPREPQVYTLPPSREEMTKNQVSLTCLVKGFYPSDIAVEWESNGQPENNYKTTPPVLDSDGSFFLYSKLTVDKSRWQEGNVFSCSVMHEALHNHYTQKSLSLSP

SEQ ID NO: 406 - protein, 459 aa, Artificial Sequence
  an artificially synthesized sequence
QVQLQESGPGLVRPSQTLSLTCTVSGYSITSDHAWSWVRQPPGRGLEWIGYISYSGITTYNPSLKSRVTMLRDTSKNQFSLRLSSVTAADTAVYYCARSLARTTAMDYWGQGSLVTVSSASTKGPSVFPLATSTSGRSANPRGPSSKSTSGGTAALGCLVKDYFPEPVTVSWNSGALTSGVHTFPAVLQSSGLYSLSSVVTVPSSSLGTQTYICNVNHKPSNTKVDKRVEPKSCDKTHTCPPCPAPELRRGPSVFLFPPKPKDTLMISRTPEVTCVVVDVSHEDPEVKFNWYVDGVEVHNAKTKPREEQYNSTYRVVSVLTVLHQDWLNGKEYKCKVSNKGLPSSIEKTISKAKGQPREPQVYTLPPSREEMTKNQVSLTCLVKGFYPSDIAVEWESNGQPENNYKTTPPVLDSDGSFFLYSKLTVDKSRWQEGNVFSCSVMHEALHNHYTQKSLSLSP

SEQ ID NO: 407 - protein, 459 aa, Artificial Sequence
  an artificially synthesized sequence
QVQLQESGPGLVRPSQTLSLTCTVSGYSITSDHAWSWVRQPPGRGLEWIGYISYSGITTYNPSLKSRVTMLRDTSKNQFSLRLSSVTAADTAVYYCARSLARTTAMDYWGQGSLVTVSSASTKGPSVFPLAPTSTSGRSANPRGSSKSTSGGTAALGCLVKDYFPEPVTVSWNSGALTSGVHTFPAVLQSSGLYSLSSVVTVPSSSLGTQTYICNVNHKPSNTKVDKRVEPKSCDKTHTCPPCPAPELRRGPSVFLFPPKPKDTLMISRTPEVTCVVVDVSHEDPEVKFNWYVDGVEVHNAKTKPREEQYNSTYRVVSVLTVLHQDWLNGKEYKCKVSNKGLPSSIEKTISKAKGQPREPQVYTLPPSREEMTKNQVSLTCLVKGFYPSDIAVEWESNGQPENNYKTTPPVLDSDGSFFLYSKLTVDKSRWQEGNVFSCSVMHEALHNHYTQKSLSLSP

SEQ ID NO: 408 - protein, 459 aa, Artificial Sequence
  an artificially synthesized sequence
QVQLQESGPGLVRPSQTLSLTCTVSGYSITSDHAWSWVRQPPGRGLEWIGYISYSGITTYNPSLKSRVTMLRDTSKNQFSLRLSSVTAADTAVYYCARSLARTTAMDYWGQGSLVTVSSASTKGPSVFPLAPSTSTSGRSANPRGSKSTSGGTAALGCLVKDYFPEPVTVSWNSGALTSGVHTFPAVLQSSGLYSLSSVVTVPSSSLGTQTYICNVNHKPSNTKVDKRVEPKSCDKTHTCPPCPAPELRRGPSVFLFPPKPKDTLMISRTPEVTCVVVDVSHEDPEVKFNWYVDGVEVHNAKTKPREEQYNSTYRVVSVLTVLHQDWLNGKEYKCKVSNKGLPSSIEKTISKAKGQPREPQVYTLPPSREEMTKNQVSLTCLVKGFYPSDIAVEWESNGQPENNYKTTPPVLDSDGSFFLYSKLTVDKSRWQEGNVFSCSVMHEALHNHYTQKSLSLSP

SEQ ID NO: 409 - protein, 459 aa, Artificial Sequence
  an artificially synthesized sequence
QVQLQESGPGLVRPSQTLSLTCTVSGYSITSDHAWSWVRQPPGRGLEWIGYISYSGITTYNPSLKSRVTMLRDTSKNQFSLRLSSVTAADTAVYYCARSLARTTAMDYWGQGSLVTVSSASTKGPSVFPLAPSSTSTSGRSANPRGKSTSGGTAALGCLVKDYFPEPVTVSWNSGALTSGVHTFPAVLQSSGLYSLSSVVTVPSSSLGTQTYICNVNHKPSNTKVDKRVEPKSCDKTHTCPPCPAPELRRGPSVFLFPPKPKDTLMISRTPEVTCVVVDVSHEDPEVKFNWYVDGVEVHNAKTKPREEQYNSTYRVVSVLTVLHQDWLNGKEYKCKVSNKGLPSSIEKTISKAKGQPREPQVYTLPPSREEMTKNQVSLTCLVKGFYPSDIAVEWESNGQPENNYKTTPPVLDSDGSFFLYSKLTVDKSRWQEGNVFSCSVMHEALHNHYTQKSLSLSP

SEQ ID NO: 410 - protein, 459 aa, Artificial Sequence
  an artificially synthesized sequence
QVQLQESGPGLVRPSQTLSLTCTVSGYSITSDHAWSWVRQPPGRGLEWIGYISYSGITTYNPSLKSRVTMLRDTSKNQFSLRLSSVTAADTAVYYCARSLARTTAMDYWGQGSLVTVSSASTKGPSVFPLAPSSKSTSTSGRSANPRGTSGGTAALGCLVKDYFPEPVTVSWNSGALTSGVHTFPAVLQSSGLYSLSSVVTVPSSSLGTQTYICNVNHKPSNTKVDKRVEPKSCDKTHTCPPCPAPELRRGPSVFLFPPKPKDTLMISRTPEVTCVVVDVSHEDPEVKFNWYVDGVEVHNAKTKPREEQYNSTYRVVSVLTVLHQDWLNGKEYKCKVSNKGLPSSIEKTISKAKGQPREPQVYTLPPSREEMTKNQVSLTCLVKGFYPSDIAVEWESNGQPENNYKTTPPVLDSDGSFFLYSKLTVDKSRWQEGNVFSCSVMHEALHNHYTQKSLSLSP

SEQ ID NO: 411 - protein, 459 aa, Artificial Sequence
  an artificially synthesized sequence
QVQLQESGPGLVRPSQTLSLTCTVSGYSITSDHAWSWVRQPPGRGLEWIGYISYSGITTYNPSLKSRVTMLRDTSKNQFSLRLSSVTAADTAVYYCARSLARTTAMDYWGQGSLVTVSSASTKGPSVFPLAPSSKSTTSTSGRSANPRGSGGTAALGCLVKDYFPEPVTVSWNSGALTSGVHTFPAVLQSSGLYSLSSVVTVPSSSLGTQTYICNVNHKPSNTKVDKRVEPKSCDKTHTCPPCPAPELRRGPSVFLFPPKPKDTLMISRTPEVTCVVVDVSHEDPEVKFNWYVDGVEVHNAKTKPREEQYNSTYRVVSVLTVLHQDWLNGKEYKCKVSNKGLPSSIEKTISKAKGQPREPQVYTLPPSREEMTKNQVSLTCLVKGFYPSDIAVEWESNGQPENNYKTTPPVLDSDGSFFLYSKLTVDKSRWQEGNVFSCSVMHEALHNHYTQKSLSLSP

SEQ ID NO: 412 - protein, 459 aa, Artificial Sequence
  an artificially synthesized sequence
QVQLQESGPGLVRPSQTLSLTCTVSGYSITSDHAWSWVRQPPGRGLEWIGYISYSGITTYNPSLKSRVTMLRDTSKNQFSLRLSSVTAADTAVYYCARSLARTTAMDYWGQGSLVTVSSASTKGPSVFPLAPSSKSTSGTSTSGRSANPRGGTAALGCLVKDYFPEPVTVSWNSGALTSGVHTFPAVLQSSGLYSLSSVVTVPSSSLGTQTYICNVNHKPSNTKVDKRVEPKSCDKTHTCPPCPAPELRRGPSVFLFPPKPKDTLMISRTPEVTCVVVDVSHEDPEVKFNWYVDGVEVHNAKTKPREEQYNSTYRVVSVLTVLHQDWLNGKEYKCKVSNKGLPSSIEKTISKAKGQPREPQVYTLPPSREEMTKNQVSLTCLVKGFYPSDIAVEWESNGQPENNYKTTPPVLDSDGSFFLYSKLTVDKSRWQEGNVFSCSVMHEALHNHYTQKSLSLSP

SEQ ID NO: 413 - protein, 459 aa, Artificial Sequence
  an artificially synthesized sequence
QVQLQESGPGLVRPSQTLSLTCTVSGYSITSDHAWSWVRQPPGRGLEWIGYISYSGITTYNPSLKSRVTMLRDTSKNQFSLRLSSVTAADTAVYYCARSLARTTAMDYWGQGSLVTVSSASTKGPSVFPLAPSSKSTSGGTTSTSGRSANPRGAALGCLVKDYFPEPVTVSWNSGALTSGVHTFPAVLQSSGLYSLSSVVTVPSSSLGTQTYICNVNHKPSNTKVDKRVEPKSCDKTHTCPPCPAPELRRGPSVFLFPPKPKDTLMISRTPEVTCVVVDVSHEDPEVKFNWYVDGVEVHNAKTKPREEQYNSTYRVVSVLTVLHQDWLNGKEYKCKVSNKGLPSSIEKTISKAKGQPREPQVYTLPPSREEMTKNQVSLTCLVKGFYPSDIAVEWESNGQPENNYKTTPPVLDSDGSFFLYSKLTVDKSRWQEGNVFSCSVMHEALHNHYTQKSLSLSP

SEQ ID NO: 414 - protein, 226 aa, Artificial Sequence
  an artificially synthesized sequence
DIQMTQSTSTSGRSANPRGPSSLSASVGDRVTITCRASQDISSYLNWYQQKPGKAPKLLIYYTSRLHSGVPSRFSGSGSGTDFTFTISSLQPEDIATYYCQQGNTLPYTFGQGTKVEIKRTVAAPSVFIFPPSDEQLKSGTASVVCLLNNFYPREAKVQWKVDNALQSGNSQESVTEQDSKDSTYSLSSTLTLSKADYEKHKVYACEVTHQGLSSPVTKSFNRGEC

SEQ ID NO: 415 - protein, 226 aa, Artificial Sequence
  an artificially synthesized sequence
DIQMTQSPTSTSGRSANPRGSSLSASVGDRVTITCRASQDISSYLNWYQQKPGKAPKLLIYYTSRLHSGVPSRFSGSGSGTDFTFTISSLQPEDIATYYCQQGNTLPYTFGQGTKVEIKRTVAAPSVFIFPPSDEQLKSGTASVVCLLNNFYPREAKVQWKVDNALQSGNSQESVTEQDSKDSTYSLSSTLTLSKADYEKHKVYACEVTHQGLSSPVTKSFNRGEC

SEQ ID NO: 416 - protein, 226 aa, Artificial Sequence
  an artificially synthesized sequence
DIQMTQSPSTSTSGRSANPRGSLSASVGDRVTITCRASQDISSYLNWYQQKPGKAPKLLIYYTSRLHSGVPSRFSGSGSGTDFTFTISSLQPEDIATYYCQQGNTLPYTFGQGTKVEIKRTVAAPSVFIFPPSDEQLKSGTASVVCLLNNFYPREAKVQWKVDNALQSGNSQESVTEQDSKDSTYSLSSTLTLSKADYEKHKVYACEVTHQGLSSPVTKSFNRGEC

SEQ ID NO: 417 - protein, 226 aa, Artificial Sequence
  an artificially synthesized sequence
DIQMTQSPSSTSTSGRSANPRGLSASVGDRVTITCRASQDISSYLNWYQQKPGKAPKLLIYYTSRLHSGVPSRFSGSGSGTDFTFTISSLQPEDIATYYCQQGNTLPYTFGQGTKVEIKRTVAAPSVFIFPPSDEQLKSGTASVVCLLNNFYPREAKVQWKVDNALQSGNSQESVTEQDSKDSTYSLSSTLTLSKADYEKHKVYACEVTHQGLSSPVTKSFNRGEC

SEQ ID NO: 418 - protein, 226 aa, Artificial Sequence
  an artificially synthesized sequence
DIQMTQSPSSLTSTSGRSANPRGSASVGDRVTITCRASQDISSYLNWYQQKPGKAPKLLIYYTSRLHSGVPSRFSGSGSGTDFTFTISSLQPEDIATYYCQQGNTLPYTFGQGTKVEIKRTVAAPSVFIFPPSDEQLKSGTASVVCLLNNFYPREAKVQWKVDNALQSGNSQESVTEQDSKDSTYSLSSTLTLSKADYEKHKVYACEVTHQGLSSPVTKSFNRGEC

SEQ ID NO: 419 - protein, 226 aa, Artificial Sequence
  an artificially synthesized sequence
DIQMTQSPSSLSTSTSGRSANPRGASVGDRVTITCRASQDISSYLNWYQQKPGKAPKLLIYYTSRLHSGVPSRFSGSGSGTDFTFTISSLQPEDIATYYCQQGNTLPYTFGQGTKVEIKRTVAAPSVFIFPPSDEQLKSGTASVVCLLNNFYPREAKVQWKVDNALQSGNSQESVTEQDSKDSTYSLSSTLTLSKADYEKHKVYACEVTHQGLSSPVTKSFNRGEC

SEQ ID NO: 420 - protein, 226 aa, Artificial Sequence
  an artificially synthesized sequence
DIQMTQSPSSLSATSTSGRSANPRGSVGDRVTITCRASQDISSYLNWYQQKPGKAPKLLIYYTSRLHSGVPSRFSGSGSGTDFTFTISSLQPEDIATYYCQQGNTLPYTFGQGTKVEIKRTVAAPSVFIFPPSDEQLKSGTASVVCLLNNFYPREAKVQWKVDNALQSGNSQESVTEQDSKDSTYSLSSTLTLSKADYEKHKVYACEVTHQGLSSPVTKSFNRGEC

SEQ ID NO: 421 - protein, 226 aa, Artificial Sequence
  an artificially synthesized sequence
DIQMTQSPSSLSASTSTSGRSANPRGVGDRVTITCRASQDISSYLNWYQQKPGKAPKLLIYYTSRLHSGVPSRFSGSGSGTDFTFTISSLQPEDIATYYCQQGNTLPYTFGQGTKVEIKRTVAAPSVFIFPPSDEQLKSGTASVVCLLNNFYPREAKVQWKVDNALQSGNSQESVTEQDSKDSTYSLSSTLTLSKADYEKHKVYACEVTHQGLSSPVTKSFNRGEC

SEQ ID NO: 422 - protein, 226 aa, Artificial Sequence
  an artificially synthesized sequence
DIQMTQSPSSLSASVTSTSGRSANPRGGDRVTITCRASQDISSYLNWYQQKPGKAPKLLIYYTSRLHSGVPSRFSGSGSGTDFTFTISSLQPEDIATYYCQQGNTLPYTFGQGTKVEIKRTVAAPSVFIFPPSDEQLKSGTASVVCLLNNFYPREAKVQWKVDNALQSGNSQESVTEQDSKDSTYSLSSTLTLSKADYEKHKVYACEVTHQGLSSPVTKSFNRGEC

SEQ ID NO: 423 - protein, 226 aa, Artificial Sequence
  an artificially synthesized sequence
DIQMTQSPSSLSASVGTSTSGRSANPRGDRVTITCRASQDISSYLNWYQQKPGKAPKLLIYYTSRLHSGVPSRFSGSGSGTDFTFTISSLQPEDIATYYCQQGNTLPYTFGQGTKVEIKRTVAAPSVFIFPPSDEQLKSGTASVVCLLNNFYPREAKVQWKVDNALQSGNSQESVTEQDSKDSTYSLSSTLTLSKADYEKHKVYACEVTHQGLSSPVTKSFNRGEC

SEQ ID NO: 424 - protein, 226 aa, Artificial Sequence
  an artificially synthesized sequence
DIQMTQSPSSLSASVGDTSTSGRSANPRGRVTITCRASQDISSYLNWYQQKPGKAPKLLIYYTSRLHSGVPSRFSGSGSGTDFTFTISSLQPEDIATYYCQQGNTLPYTFGQGTKVEIKRTVAAPSVFIFPPSDEQLKSGTASVVCLLNNFYPREAKVQWKVDNALQSGNSQESVTEQDSKDSTYSLSSTLTLSKADYEKHKVYACEVTHQGLSSPVTKSFNRGEC

SEQ ID NO: 425 - protein, 226 aa, Artificial Sequence
  an artificially synthesized sequence
DIQMTQSPSSLSASVGDRTSTSGRSANPRGVTITCRASQDISSYLNWYQQKPGKAPKLLIYYTSRLHSGVPSRFSGSGSGTDFTFTISSLQPEDIATYYCQQGNTLPYTFGQGTKVEIKRTVAAPSVFIFPPSDEQLKSGTASVVCLLNNFYPREAKVQWKVDNALQSGNSQESVTEQDSKDSTYSLSSTLTLSKADYEKHKVYACEVTHQGLSSPVTKSFNRGEC

SEQ ID NO: 426 - protein, 226 aa, Artificial Sequence
  an artificially synthesized sequence
DIQMTQSPSSLSASVGDRVTITCRASQDISSYLNWYQQKTSTSGRSANPRGPGKAPKLLIYYTSRLHSGVPSRFSGSGSGTDFTFTISSLQPEDIATYYCQQGNTLPYTFGQGTKVEIKRTVAAPSVFIFPPSDEQLKSGTASVVCLLNNFYPREAKVQWKVDNALQSGNSQESVTEQDSKDSTYSLSSTLTLSKADYEKHKVYACEVTHQGLSSPVTKSFNRGEC

SEQ ID NO: 427 - protein, 226 aa, Artificial Sequence
  an artificially synthesized sequence
DIQMTQSPSSLSASVGDRVTITCRASQDISSYLNWYQQKPTSTSGRSANPRGGKAPKLLIYYTSRLHSGVPSRFSGSGSGTDFTFTISSLQPEDIATYYCQQGNTLPYTFGQGTKVEIKRTVAAPSVFIFPPSDEQLKSGTASVVCLLNNFYPREAKVQWKVDNALQSGNSQESVTEQDSKDSTYSLSSTLTLSKADYEKHKVYACEVTHQGLSSPVTKSFNRGEC

SEQ ID NO: 428 - protein, 226 aa, Artificial Sequence
  an artificially synthesized sequence
DIQMTQSPSSLSASVGDRVTITCRASQDISSYLNWYQQKPGTSTSGRSANPRGKAPKLLIYYTSRLHSGVPSRFSGSGSGTDFTFTISSLQPEDIATYYCQQGNTLPYTFGQGTKVEIKRTVAAPSVFIFPPSDEQLKSGTASVVCLLNNFYPREAKVQWKVDNALQSGNSQESVTEQDSKDSTYSLSSTLTLSKADYEKHKVYACEVTHQGLSSPVTKSFNRGEC

SEQ ID NO: 429 - protein, 226 aa, Artificial Sequence
  an artificially synthesized sequence
DIQMTQSPSSLSASVGDRVTITCRASQDISSYLNWYQQKPGKTSTSGRSANPRGAPKLLIYYTSRLHSGVPSRFSGSGSGTDFTFTISSLQPEDIATYYCQQGNTLPYTFGQGTKVEIKRTVAAPSVFIFPPSDEQLKSGTASVVCLLNNFYPREAKVQWKVDNALQSGNSQESVTEQDSKDSTYSLSSTLTLSKADYEKHKVYACEVTHQGLSSPVTKSFNRGEC

SEQ ID NO: 430 - protein, 226 aa, Artificial Sequence
  an artificially synthesized sequence
DIQMTQSPSSLSASVGDRVTITCRASQDISSYLNWYQQKPGKATSTSGRSANPRGPKLLIYYTSRLHSGVPSRFSGSGSGTDFTFTISSLQPEDIATYYCQQGNTLPYTFGQGTKVEIKRTVAAPSVFIFPPSDEQLKSGTASVVCLLNNFYPREAKVQWKVDNALQSGNSQESVTEQDSKDSTYSLSSTLTLSKADYEKHKVYACEVTHQGLSSPVTKSFNRGEC

SEQ ID NO: 431 - protein, 226 aa, Artificial Sequence
  an artificially synthesized sequence
DIQMTQSPSSLSASVGDRVTITCRASQDISSYLNWYQQKPGKAPTSTSGRSANPRGKLLIYYTSRLHSGVPSRFSGSGSGTDFTFTISSLQPEDIATYYCQQGNTLPYTFGQGTKVEIKRTVAAPSVFIFPPSDEQLKSGTASVVCLLNNFYPREAKVQWKVDNALQSGNSQESVTEQDSKDSTYSLSSTLTLSKADYEKHKVYACEVTHQGLSSPVTKSFNRGEC

SEQ ID NO: 432 - protein, 226 aa, Artificial Sequence
  an artificially synthesized sequence
DIQMTQSPSSLSASVGDRVTITCRASQDISSYLNWYQQKPGKAPKTSTSGRSANPRGLLIYYTSRLHSGVPSRFSGSGSGTDFTFTISSLQPEDIATYYCQQGNTLPYTFGQGTKVEIKRTVAAPSVFIFPPSDEQLKSGTASVVCLLNNFYPREAKVQWKVDNALQSGNSQESVTEQDSKDSTYSLSSTLTLSKADYEKHKVYACEVTHQGLSSPVTKSFNRGEC

SEQ ID NO: 433 - protein, 226 aa, Artificial Sequence
  an artificially synthesized sequence
DIQMTQSPSSLSASVGDRVTITCRASQDISSYLNWYQQKPGKAPKLLIYTSTSGRSANPRGYTSRLHSGVPSRFSGSGSGTDFTFTISSLQPEDIATYYCQQGNTLPYTFGQGTKVEIKRTVAAPSVFIFPPSDEQLKSGTASVVCLLNNFYPREAKVQWKVDNALQSGNSQESVTEQDSKDSTYSLSSTLTLSKADYEKHKVYACEVTHQGLSSPVTKSFNRGEC

SEQ ID NO: 434 - protein, 226 aa, Artificial Sequence
  an artificially synthesized sequence
DIQMTQSPSSLSASVGDRVTITCRASQDISSYLNWYQQKPGKAPKLLIYYTSTSGRSANPRGTSRLHSGVPSRFSGSGSGTDFTFTISSLQPEDIATYYCQQGNTLPYTFGQGTKVEIKRTVAAPSVFIFPPSDEQLKSGTASVVCLLNNFYPREAKVQWKVDNALQSGNSQESVTEQDSKDSTYSLSSTLTLSKADYEKHKVYACEVTHQGLSSPVTKSFNRGEC

SEQ ID NO: 435 - protein, 226 aa, Artificial Sequence
  an artificially synthesized sequence
DIQMTQSPSSLSASVGDRVTITCRASQDISSYLNWYQQKPGKAPKLLIYYTTSTSGRSANPRGSRLHSGVPSRFSGSGSGTDFTFTISSLQPEDIATYYCQQGNTLPYTFGQGTKVEIKRTVAAPSVFIFPPSDEQLKSGTASVVCLLNNFYPREAKVQWKVDNALQSGNSQESVTEQDSKDSTYSLSSTLTLSKADYEKHKVYACEVTHQGLSSPVTKSFNRGEC

SEQ ID NO: 436 - protein, 226 aa, Artificial Sequence
  an artificially synthesized sequence
DIQMTQSPSSLSASVGDRVTITCRASQDISSYLNWYQQKPGKAPKLLIYYTSTSTSGRSANPRGRLHSGVPSRFSGSGSGTDFTFTISSLQPEDIATYYCQQGNTLPYTFGQGTKVEIKRTVAAPSVFIFPPSDEQLKSGTASVVCLLNNFYPREAKVQWKVDNALQSGNSQESVTEQDSKDSTYSLSSTLTLSKADYEKHKVYACEVTHQGLSSPVTKSFNRGEC

SEQ ID NO: 437 - protein, 226 aa, Artificial Sequence
  an artificially synthesized sequence
DIQMTQSPSSLSASVGDRVTITCRASQDISSYLNWYQQKPGKAPKLLIYYTSRTSTSGRSANPRGLHSGVPSRFSGSGSGTDFTFTISSLQPEDIATYYCQQGNTLPYTFGQGTKVEIKRTVAAPSVFIFPPSDEQLKSGTASVVCLLNNFYPREAKVQWKVDNALQSGNSQESVTEQDSKDSTYSLSSTLTLSKADYEKHKVYACEVTHQGLSSPVTKSFNRGEC

SEQ ID NO: 438 - protein, 226 aa, Artificial Sequence
  an artificially synthesized sequence
DIQMTQSPSSLSASVGDRVTITCRASQDISSYLNWYQQKPGKAPKLLIYYTSRLTSTSGRSANPRGHSGVPSRFSGSGSGTDFTFTISSLQPEDIATYYCQQGNTLPYTFGQGTKVEIKRTVAAPSVFIFPPSDEQLKSGTASVVCLLNNFYPREAKVQWKVDNALQSGNSQESVTEQDSKDSTYSLSSTLTLSKADYEKHKVYACEVTHQGLSSPVTKSFNRGEC

SEQ ID NO: 439 - protein, 226 aa, Artificial Sequence
  an artificially synthesized sequence
DIQMTQSPSSLSASVGDRVTITCRASQDISSYLNWYQQKPGKAPKLLIYYTSRLHTSTSGRSANPRGSGVPSRFSGSGSGTDFTFTISSLQPEDIATYYCQQGNTLPYTFGQGTKVEIKRTVAAPSVFIFPPSDEQLKSGTASVVCLLNNFYPREAKVQWKVDNALQSGNSQESVTEQDSKDSTYSLSSTLTLSKADYEKHKVYACEVTHQGLSSPVTKSFNRGEC

SEQ ID NO: 440 - protein, 226 aa, Artificial Sequence
  an artificially synthesized sequence
DIQMTQSPSSLSASVGDRVTITCRASQDISSYLNWYQQKPGKAPKLLIYYTSRLHSTSTSGRSANPRGGVPSRFSGSGSGTDFTFTISSLQPEDIATYYCQQGNTLPYTFGQGTKVEIKRTVAAPSVFIFPPSDEQLKSGTASVVCLLNNFYPREAKVQWKVDNALQSGNSQESVTEQDSKDSTYSLSSTLTLSKADYEKHKVYACEVTHQGLSSPVTKSFNRGEC

SEQ ID NO: 441 - protein, 226 aa, Artificial Sequence
  an artificially synthesized sequence
DIQMTQSPSSLSASVGDRVTITCRASQDISSYLNWYQQKPGKAPKLLIYYTSRLHSGTSTSGRSANPRGVPSRFSGSGSGTDFTFTISSLQPEDIATYYCQQGNTLPYTFGQGTKVEIKRTVAAPSVFIFPPSDEQLKSGTASVVCLLNNFYPREAKVQWKVDNALQSGNSQESVTEQDSKDSTYSLSSTLTLSKADYEKHKVYACEVTHQGLSSPVTKSFNRGEC

SEQ ID NO: 442 - protein, 226 aa, Artificial Sequence
  an artificially synthesized sequence
DIQMTQSPSSLSASVGDRVTITCRASQDISSYLNWYQQKPGKAPKLLIYYTSRLHSGVTSTSGRSANPRGPSRFSGSGSGTDFTFTISSLQPEDIATYYCQQGNTLPYTFGQGTKVEIKRTVAAPSVFIFPPSDEQLKSGTASVVCLLNNFYPREAKVQWKVDNALQSGNSQESVTEQDSKDSTYSLSSTLTLSKADYEKHKVYACEVTHQGLSSPVTKSFNRGEC

SEQ ID NO: 443 - protein, 226 aa, Artificial Sequence
  an artificially synthesized sequence
DIQMTQSPSSLSASVGDRVTITCRASQDISSYLNWYQQKPGKAPKLLIYYTSRLHSGVPTSTSGRSANPRGSRFSGSGSGTDFTFTISSLQPEDIATYYCQQGNTLPYTFGQGTKVEIKRTVAAPSVFIFPPSDEQLKSGTASVVCLLNNFYPREAKVQWKVDNALQSGNSQESVTEQDSKDSTYSLSSTLTLSKADYEKHKVYACEVTHQGLSSPVTKSFNRGEC

SEQ ID NO: 444 - protein, 226 aa, Artificial Sequence
  an artificially synthesized sequence
DIQMTQSPSSLSASVGDRVTITCRASQDISSYLNWYQQKPGKAPKLLIYYTSRLHSGVPSTSTSGRSANPRGRFSGSGSGTDFTFTISSLQPEDIATYYCQQGNTLPYTFGQGTKVEIKRTVAAPSVFIFPPSDEQLKSGTASVVCLLNNFYPREAKVQWKVDNALQSGNSQESVTEQDSKDSTYSLSSTLTLSKADYEKHKVYACEVTHQGLSSPVTKSFNRGEC

SEQ ID NO: 445 - protein, 226 aa, Artificial Sequence
  an artificially synthesized sequence
DIQMTQSPSSLSASVGDRVTITCRASQDISSYLNWYQQKPGKAPKLLIYYTSRLHSGVPSRFSGSGSGTDFTFTISSLQPEDIATYYCQQGNTLPYTSTSGRSANPRGTFGQGTKVEIKRTVAAPSVFIFPPSDEQLKSGTASVVCLLNNFYPREAKVQWKVDNALQSGNSQESVTEQDSKDSTYSLSSTLTLSKADYEKHKVYACEVTHQGLSSPVTKSFNRGEC

SEQ ID NO: 446 - protein, 226 aa, Artificial Sequence
  an artificially synthesized sequence
DIQMTQSPSSLSASVGDRVTITCRASQDISSYLNWYQQKPGKAPKLLIYYTSRLHSGVPSRFSGSGSGTDFTFTISSLQPEDIATYYCQQGNTLPYTTSTSGRSANPRGFGQGTKVEIKRTVAAPSVFIFPPSDEQLKSGTASVVCLLNNFYPREAKVQWKVDNALQSGNSQESVTEQDSKDSTYSLSSTLTLSKADYEKHKVYACEVTHQGLSSPVTKSFNRGEC

SEQ ID NO: 447 - protein, 226 aa, Artificial Sequence
  an artificially synthesized sequence
DIQMTQSPSSLSASVGDRVTITCRASQDISSYLNWYQQKPGKAPKLLIYYTSRLHSGVPSRFSGSGSGTDFTFTISSLQPEDIATYYCQQGNTLPYTFTSTSGRSANPRGGQGTKVEIKRTVAAPSVFIFPPSDEQLKSGTASVVCLLNNFYPREAKVQWKVDNALQSGNSQESVTEQDSKDSTYSLSSTLTLSKADYEKHKVYACEVTHQGLSSPVTKSFNRGEC

SEQ ID NO: 448 - protein, 226 aa, Artificial Sequence
  an artificially synthesized sequence
DIQMTQSPSSLSASVGDRVTITCRASQDISSYLNWYQQKPGKAPKLLIYYTSRLHSGVPSRFSGSGSGTDFTFTISSLQPEDIATYYCQQGNTLPYTFGTSTSGRSANPRGQGTKVEIKRTVAAPSVFIFPPSDEQLKSGTASVVCLLNNFYPREAKVQWKVDNALQSGNSQESVTEQDSKDSTYSLSSTLTLSKADYEKHKVYACEVTHQGLSSPVTKSFNRGEC

SEQ ID NO: 449 - protein, 226 aa, Artificial Sequence
  an artificially synthesized sequence
DIQMTQSPSSLSASVGDRVTITCRASQDISSYLNWYQQKPGKAPKLLIYYTSRLHSGVPSRFSGSGSGTDFTFTISSLQPEDIATYYCQQGNTLPYTFGQTSTSGRSANPRGGTKVEIKRTVAAPSVFIFPPSDEQLKSGTASVVCLLNNFYPREAKVQWKVDNALQSGNSQESVTEQDSKDSTYSLSSTLTLSKADYEKHKVYACEVTHQGLSSPVTKSFNRGEC

SEQ ID NO: 450 - protein, 226 aa, Artificial Sequence
  an artificially synthesized sequence
DIQMTQSPSSLSASVGDRVTITCRASQDISSYLNWYQQKPGKAPKLLIYYTSRLHSGVPSRFSGSGSGTDFTFTISSLQPEDIATYYCQQGNTLPYTFGQGTSTSGRSANPRGTKVEIKRTVAAPSVFIFPPSDEQLKSGTASVVCLLNNFYPREAKVQWKVDNALQSGNSQESVTEQDSKDSTYSLSSTLTLSKADYEKHKVYACEVTHQGLSSPVTKSFNRGEC

SEQ ID NO: 451 - protein, 226 aa, Artificial Sequence
  an artificially synthesized sequence
DIQMTQSPSSLSASVGDRVTITCRASQDISSYLNWYQQKPGKAPKLLIYYTSRLHSGVPSRFSGSGSGTDFTFTISSLQPEDIATYYCQQGNTLPYTFGQGTTSTSGRSANPRGKVEIKRTVAAPSVFIFPPSDEQLKSGTASVVCLLNNFYPREAKVQWKVDNALQSGNSQESVTEQDSKDSTYSLSSTLTLSKADYEKHKVYACEVTHQGLSSPVTKSFNRGEC

SEQ ID NO: 452 - protein, 226 aa, Artificial Sequence
  an artificially synthesized sequence
DIQMTQSPSSLSASVGDRVTITCRASQDISSYLNWYQQKPGKAPKLLIYYTSRLHSGVPSRFSGSGSGTDFTFTISSLQPEDIATYYCQQGNTLPYTFGQGTKTSTSGRSANPRGVEIKRTVAAPSVFIFPPSDEQLKSGTASVVCLLNNFYPREAKVQWKVDNALQSGNSQESVTEQDSKDSTYSLSSTLTLSKADYEKHKVYACEVTHQGLSSPVTKSFNRGEC

SEQ ID NO: 453 - protein, 226 aa, Artificial Sequence
  an artificially synthesized sequence
DIQMTQSPSSLSASVGDRVTITCRASQDISSYLNWYQQKPGKAPKLLIYYTSRLHSGVPSRFSGSGSGTDFTFTISSLQPEDIATYYCQQGNTLPYTFGQGTKVTSTSGRSANPRGEIKRTVAAPSVFIFPPSDEQLKSGTASVVCLLNNFYPREAKVQWKVDNALQSGNSQESVTEQDSKDSTYSLSSTLTLSKADYEKHKVYACEVTHQGLSSPVTKSFNRGEC

SEQ ID NO: 454 - protein, 226 aa, Artificial Sequence
  an artificially synthesized sequence
DIQMTQSPSSLSASVGDRVTITCRASQDISSYLNWYQQKPGKAPKLLIYYTSRLHSGVPSRFSGSGSGTDFTFTISSLQPEDIATYYCQQGNTLPYTFGQGTKVETSTSGRSANPRGIKRTVAAPSVFIFPPSDEQLKSGTASVVCLLNNFYPREAKVQWKVDNALQSGNSQESVTEQDSKDSTYSLSSTLTLSKADYEKHKVYACEVTHQGLSSPVTKSFNRGEC

SEQ ID NO: 455 - protein, 226 aa, Artificial Sequence
  an artificially synthesized sequence
DIQMTQSPSSLSASVGDRVTITCRASQDISSYLNWYQQKPGKAPKLLIYYTSRLHSGVPSRFSGSGSGTDFTFTISSLQPEDIATYYCQQGNTLPYTFGQGTKVEITSTSGRSANPRGKRTVAAPSVFIFPPSDEQLKSGTASVVCLLNNFYPREAKVQWKVDNALQSGNSQESVTEQDSKDSTYSLSSTLTLSKADYEKHKVYACEVTHQGLSSPVTKSFNRGEC

SEQ ID NO: 456 - protein, 226 aa, Artificial Sequence
  an artificially synthesized sequence
DIQMTQSPSSLSASVGDRVTITCRASQDISSYLNWYQQKPGKAPKLLIYYTSRLHSGVPSRFSGSGSGTDFTFTISSLQPEDIATYYCQQGNTLPYTFGQGTKVEIKTSTSGRSANPRGRTVAAPSVFIFPPSDEQLKSGTASVVCLLNNFYPREAKVQWKVDNALQSGNSQESVTEQDSKDSTYSLSSTLTLSKADYEKHKVYACEVTHQGLSSPVTKSFNRGEC

SEQ ID NO: 457 - protein, 226 aa, Artificial Sequence
  an artificially synthesized sequence
DIQMTQSPSSLSASVGDRVTITCRASQDISSYLNWYQQKPGKAPKLLIYYTSRLHSGVPSRFSGSGSGTDFTFTISSLQPEDIATYYCQQGNTLPYTFGQGTKVEIKRTSTSGRSANPRGTVAAPSVFIFPPSDEQLKSGTASVVCLLNNFYPREAKVQWKVDNALQSGNSQESVTEQDSKDSTYSLSSTLTLSKADYEKHKVYACEVTHQGLSSPVTKSFNRGEC

SEQ ID NO: 458 - protein, 226 aa, Artificial Sequence
  an artificially synthesized sequence
DIQMTQSPSSLSASVGDRVTITCRASQDISSYLNWYQQKPGKAPKLLIYYTSRLHSGVPSRFSGSGSGTDFTFTISSLQPEDIATYYCQQGNTLPYTFGQGTKVEIKRTTSTSGRSANPRGVAAPSVFIFPPSDEQLKSGTASVVCLLNNFYPREAKVQWKVDNALQSGNSQESVTEQDSKDSTYSLSSTLTLSKADYEKHKVYACEVTHQGLSSPVTKSFNRGEC

SEQ ID NO: 459 - protein, 226 aa, Artificial Sequence
  an artificially synthesized sequence
DIQMTQSPSSLSASVGDRVTITCRASQDISSYLNWYQQKPGKAPKLLIYYTSRLHSGVPSRFSGSGSGTDFTFTISSLQPEDIATYYCQQGNTLPYTFGQGTKVEIKRTVTSTSGRSANPRGAAPSVFIFPPSDEQLKSGTASVVCLLNNFYPREAKVQWKVDNALQSGNSQESVTEQDSKDSTYSLSSTLTLSKADYEKHKVYACEVTHQGLSSPVTKSFNRGEC

SEQ ID NO: 460 - protein, 226 aa, Artificial Sequence
  an artificially synthesized sequence
DIQMTQSPSSLSASVGDRVTITCRASQDISSYLNWYQQKPGKAPKLLIYYTSRLHSGVPSRFSGSGSGTDFTFTISSLQPEDIATYYCQQGNTLPYTFGQGTKVEIKRTVATSTSGRSANPRGAPSVFIFPPSDEQLKSGTASVVCLLNNFYPREAKVQWKVDNALQSGNSQESVTEQDSKDSTYSLSSTLTLSKADYEKHKVYACEVTHQGLSSPVTKSFNRGEC

SEQ ID NO: 461 - protein, 226 aa, Artificial Sequence
  an artificially synthesized sequence
DIQMTQSPSSLSASVGDRVTITCRASQDISSYLNWYQQKPGKAPKLLIYYTSRLHSGVPSRFSGSGSGTDFTFTISSLQPEDIATYYCQQGNTLPYTFGQGTKVEIKRTVAATSTSGRSANPRGPSVFIFPPSDEQLKSGTASVVCLLNNFYPREAKVQWKVDNALQSGNSQESVTEQDSKDSTYSLSSTLTLSKADYEKHKVYACEVTHQGLSSPVTKSFNRGEC

SEQ ID NO: 462 - protein, 226 aa, Artificial Sequence
  an artificially synthesized sequence
DIQMTQSPSSLSASVGDRVTITCRASQDISSYLNWYQQKPGKAPKLLIYYTSRLHSGVPSRFSGSGSGTDFTFTISSLQPEDIATYYCQQGNTLPYTFGQGTKVEIKRTVAAPTSTSGRSANPRGSVFIFPPSDEQLKSGTASVVCLLNNFYPREAKVQWKVDNALQSGNSQESVTEQDSKDSTYSLSSTLTLSKADYEKHKVYACEVTHQGLSSPVTKSFNRGEC

SEQ ID NO: 463 - protein, 226 aa, Artificial Sequence
  an artificially synthesized sequence
DIQMTQSPSSLSASVGDRVTITCRASQDISSYLNWYQQKPGKAPKLLIYYTSRLHSGVPSRFSGSGSGTDFTFTISSLQPEDIATYYCQQGNTLPYTFGQGTKVEIKRTVAAPSVTSTSGRSANPRGFIFPPSDEQLKSGTASVVCLLNNFYPREAKVQWKVDNALQSGNSQESVTEQDSKDSTYSLSSTLTLSKADYEKHKVYACEVTHQGLSSPVTKSFNRGEC

SEQ ID NO: 464 - protein, 226 aa, Artificial Sequence
  an artificially synthesized sequence
DIQMTQSPSSLSASVGDRVTITCRASQDISSYLNWYQQKPGKAPKLLIYYTSRLHSGVPSRFSGSGSGTDFTFTISSLQPEDIATYYCQQGNTLPYTFGQGTKVEIKRTVAAPSVFTSTSGRSANPRGIFPPSDEQLKSGTASVVCLLNNFYPREAKVQWKVDNALQSGNSQESVTEQDSKDSTYSLSSTLTLSKADYEKHKVYACEVTHQGLSSPVTKSFNRGEC

SEQ ID NO: 465 - protein, 226 aa, Artificial Sequence
  an artificially synthesized sequence
DIQMTQSPSSLSASVGDRVTITCRASQDISSYLNWYQQKPGKAPKLLIYYTSRLHSGVPSRFSGSGSGTDFTFTISSLQPEDIATYYCQQGNTLPYTFGQGTKVEIKRTVAAPSVFITSTSGRSANPRGFPPSDEQLKSGTASVVCLLNNFYPREAKVQWKVDNALQSGNSQESVTEQDSKDSTYSLSSTLTLSKADYEKHKVYACEVTHQGLSSPVTKSFNRGEC

SEQ ID NO: 466 - protein, 226 aa, Artificial Sequence
  an artificially synthesized sequence
DIQMTQSPSSLSASVGDRVTITCRASQDISSYLNWYQQKPGKAPKLLIYYTSRLHSGVPSRFSGSGSGTDFTFTISSLQPEDIATYYCQQGNTLPYTFGQGTKVEIKRTVAAPSVFIFTSTSGRSANPRGPPSDEQLKSGTASVVCLLNNFYPREAKVQWKVDNALQSGNSQESVTEQDSKDSTYSLSSTLTLSKADYEKHKVYACEVTHQGLSSPVTKSFNRGEC

SEQ ID NO: 467 - protein, 226 aa, Artificial Sequence
  an artificially synthesized sequence
DIQMTQSPSSLSASVGDRVTITCRASQDISSYLNWYQQKPGKAPKLLIYYTSRLHSGVPSRFSGSGSGTDFTFTISSLQPEDIATYYCQQGNTLPYTFGQGTKVEIKRTVAAPSVFIFPTSTSGRSANPRGPSDEQLKSGTASVVCLLNNFYPREAKVQWKVDNALQSGNSQESVTEQDSKDSTYSLSSTLTLSKADYEKHKVYACEVTHQGLSSPVTKSFNRGEC

SEQ ID NO: 468 - protein, 226 aa, Artificial Sequence
  an artificially synthesized sequence
DIQMTQSPSSLSASVGDRVTITCRASQDISSYLNWYQQKPGKAPKLLIYYTSRLHSGVPSRFSGSGSGTDFTFTISSLQPEDIATYYCQQGNTLPYTFGQGTKVEIKRTVAAPSVFIFPPTSTSGRSANPRGSDEQLKSGTASVVCLLNNFYPREAKVQWKVDNALQSGNSQESVTEQDSKDSTYSLSSTLTLSKADYEKHKVYACEVTHQGLSSPVTKSFNRGEC

SEQ ID NO: 469 - protein, 226 aa, Artificial Sequence
  an artificially synthesized sequence
DIQMTQSPSSLSASVGDRVTITCRASQDISSYLNWYQQKPGKAPKLLIYYTSRLHSGVPSRFSGSGSGTDFTFTISSLQPEDIATYYCQQGNTLPYTFGQGTKVEIKRTVAAPSVFIFPPSTSTSGRSANPRGDEQLKSGTASVVCLLNNFYPREAKVQWKVDNALQSGNSQESVTEQDSKDSTYSLSSTLTLSKADYEKHKVYACEVTHQGLSSPVTKSFNRGEC

SEQ ID NO: 470 - protein, 226 aa, Artificial Sequence
  an artificially synthesized sequence
DIQMTQSPSSLSASVGDRVTITCRASQDISSYLNWYQQKPGKAPKLLIYYTSRLHSGVPSRFSGSGSGTDFTFTISSLQPEDIATYYCQQGNTLPYTFGQGTKVEIKRTVAAPSVFIFPPSDTSTSGRSANPRGEQLKSGTASVVCLLNNFYPREAKVQWKVDNALQSGNSQESVTEQDSKDSTYSLSSTLTLSKADYEKHKVYACEVTHQGLSSPVTKSFNRGEC

SEQ ID NO: 471 - protein, 226 aa, Artificial Sequence
  an artificially synthesized sequence
DIQMTQSPSSLSASVGDRVTITCRASQDISSYLNWYQQKPGKAPKLLIYYTSRLHSGVPSRFSGSGSGTDFTFTISSLQPEDIATYYCQQGNTLPYTFGQGTKVEIKRTVAAPSVFIFPPSDETSTSGRSANPRGQLKSGTASVVCLLNNFYPREAKVQWKVDNALQSGNSQESVTEQDSKDSTYSLSSTLTLSKADYEKHKVYACEVTHQGLSSPVTKSFNRGEC

SEQ ID NO: 472 - protein, 226 aa, Artificial Sequence
  an artificially synthesized sequence
DIQMTQSPSSLSASVGDRVTITCRASQDISSYLNWYQQKPGKAPKLLIYYTSRLHSGVPSRFSGSGSGTDFTFTISSLQPEDIATYYCQQGNTLPYTFGQGTKVEIKRTVAAPSVFIFPPSDEQTSTSGRSANPRGLKSGTASVVCLLNNFYPREAKVQWKVDNALQSGNSQESVTEQDSKDSTYSLSSTLTLSKADYEKHKVYACEVTHQGLSSPVTKSFNRGEC

SEQ ID NO: 473 - protein, 226 aa, Artificial Sequence
  an artificially synthesized sequence
DIQMTQSPSSLSASVGDRVTITCRASQDISSYLNWYQQKPGKAPKLLIYYTSRLHSGVPSRFSGSGSGTDFTFTISSLQPEDIATYYCQQGNTLPYTFGQGTKVEIKRTVAAPSVFIFPPSDEQLTSTSGRSANPRGKSGTASVVCLLNNFYPREAKVQWKVDNALQSGNSQESVTEQDSKDSTYSLSSTLTLSKADYEKHKVYACEVTHQGLSSPVTKSFNRGEC

SEQ ID NO: 474 - protein, 226 aa, Artificial Sequence
  an artificially synthesized sequence
DIQMTQSPSSLSASVGDRVTITCRASQDISSYLNWYQQKPGKAPKLLIYYTSRLHSGVPSRFSGSGSGTDFTFTISSLQPEDIATYYCQQGNTLPYTFGQGTKVEIKRTVAAPSVFIFPPSDEQLKTSTSGRSANPRGSGTASVVCLLNNFYPREAKVQWKVDNALQSGNSQESVTEQDSKDSTYSLSSTLTLSKADYEKHKVYACEVTHQGLSSPVTKSFNRGEC

SEQ ID NO: 475 - protein, 226 aa, Artificial Sequence
  an artificially synthesized sequence
DIQMTQSPSSLSASVGDRVTITCRASQDISSYLNWYQQKPGKAPKLLIYYTSRLHSGVPSRFSGSGSGTDFTFTISSLQPEDIATYYCQQGNTLPYTFGQGTKVEIKRTVAAPSVFIFPPSDEQLKSTSTSGRSANPRGGTASVVCLLNNFYPREAKVQWKVDNALQSGNSQESVTEQDSKDSTYSLSSTLTLSKADYEKHKVYACEVTHQGLSSPVTKSFNRGEC

SEQ ID NO: 476 - protein, 226 aa, Artificial Sequence
  an artificially synthesized sequence
DIQMTQSPSSLSASVGDRVTITCRASQDISSYLNWYQQKPGKAPKLLIYYTSRLHSGVPSRFSGSGSGTDFTFTISSLQPEDIATYYCQQGNTLPYTFGQGTKVEIKRTVAAPSVFIFPPSDEQLKSGTSTSGRSANPRGTASVVCLLNNFYPREAKVQWKVDNALQSGNSQESVTEQDSKDSTYSLSSTLTLSKADYEKHKVYACEVTHQGLSSPVTKSFNRGEC

SEQ ID NO: 477 - protein, 226 aa, Artificial Sequence
  an artificially synthesized sequence
DIQMTQSPSSLSASVGDRVTITCRASQDISSYLNWYQQKPGKAPKLLIYYTSRLHSGVPSRFSGSGSGTDFTFTISSLQPEDIATYYCQQGNTLPYTFGQGTKVEIKRTVAAPSVFIFPPSDEQLKSGTTSTSGRSANPRGASVVCLLNNFYPREAKVQWKVDNALQSGNSQESVTEQDSKDSTYSLSSTLTLSKADYEKHKVYACEVTHQGLSSPVTKSFNRGEC

SEQ ID NO: 478 - protein, 226 aa, Artificial Sequence
  an artificially synthesized sequence
DIQMTQSPSSLSASVGDRVTITCRASQDISSYLNWYQQKPGKAPKLLIYYTSRLHSGVPSRFSGSGSGTDFTFTISSLQPEDIATYYCQQGNTLPYTFGQGTKVEIKRTVAAPSVFIFPPSDEQLKSGTATSTSGRSANPRGSVVCLLNNFYPREAKVQWKVDNALQSGNSQESVTEQDSKDSTYSLSSTLTLSKADYEKHKVYACEVTHQGLSSPVTKSFNRGEC

SEQ ID NO: 479 - protein, 107 aa, Artificial Sequence
  an artificially synthesized sequence
DIQMTQSPSSLSASVGDRVTITCRASQWIGRELRWYQQKPGKAPMFLIYHASRLQRGVPSRFSGSGSGTDFTLTISSLQPEDFATYYCQQYHGWPLTFGQGTKVEIK

SEQ ID NO: 480 - protein, 107 aa, Artificial Sequence
  an artificially synthesized sequence
DIQMTQSPSSLSASVGDRVTISCRASQDIYLNLDWYQQKPGKAPKLLINFGSELQSGVPSRFSGSGYGTDFTLTISSLQPEDSATYYCQPSFYYPYTFGQGTKVEIK

SEQ ID NO: 481 - protein, 344 aa, Artificial Sequence
  an artificially synthesized sequence
AGAGPQGLAGQRGIVAGSTKGPSVFPLAPSSKSTSGGTAALGCLVKDYFPEPVTVSWNSGALTSGVHTFPAVLQSSGLYSLSSVVTVPSSSLGTQTYICNVNHKPSNTKVDKKVEPKSCDKTHTCPPCPAPELLGGPSVFLFPPKPKDTLMISRTPEVTCVVVDVSHEDPEVKFNWYVDGVEVHNAKTKPREEQYNSTYRVVSVLTVLHQDWLNGKEYKCKVSNKALPAPIEKTISKAKGQPREPQVYTLPPSREEMTKNQVSLTCLVKGFYPSDIAVEWESNGQPENNYKTTPPVLDSDGSFFLYSKLTVDKSRWQQGNVFSCSVMHEALHNHYTQKSLSLSP

SEQ ID NO: 482 - protein, 345 aa, Artificial Sequence
  an artificially synthesized sequence
AGPPGPQGLAGQRGIVGLSTKGPSVFPLAPSSKSTSGGTAALGCLVKDYFPEPVTVSWNSGALTSGVHTFPAVLQSSGLYSLSSVVTVPSSSLGTQTYICNVNHKPSNTKVDKKVEPKSCDKTHTCPPCPAPELLGGPSVFLFPPKPKDTLMISRTPEVTCVVVDVSHEDPEVKFNWYVDGVEVHNAKTKPREEQYNSTYRVVSVLTVLHQDWLNGKEYKCKVSNKALPAPIEKTISKAKGQPREPQVYTLPPSREEMTKNQVSLTCLVKGFYPSDIAVEWESNGQPENNYKTTPPVLDSDGSFFLYSKLTVDKSRWQQGNVFSCSVMHEALHNHYTQKSLSLSP

SEQ ID NO: 483 - protein, 340 aa, Artificial Sequence
  an artificially synthesized sequence
ATSTSGRSANPRGSTKGPSVFPLAPSSKSTSGGTAALGCLVKDYFPEPVTVSWNSGALTSGVHTFPAVLQSSGLYSLSSVVTVPSSSLGTQTYICNVNHKPSNTKVDKKVEPKSCDKTHTCPPCPAPELLGGPSVFLFPPKPKDTLMISRTPEVTCVVVDVSHEDPEVKFNWYVDGVEVHNAKTKPREEQYNSTYRVVSVLTVLHQDWLNGKEYKCKVSNKALPAPIEKTISKAKGQPREPQVYTLPPSREEMTKNQVSLTCLVKGFYPSDIAVEWESNGQPENNYKTTPPVLDSDGSFFLYSKLTVDKSRWQQGNVFSCSVMHEALHNHYTQKSLSLSP

SEQ ID NO: 484 - protein, 107 aa, Artificial Sequence
  an artificially synthesized sequence
DIQMTQSPSSLSASVGDRVTITCRASQSISSYLNWYQQKPGKAPKLLIYAASSLQSGVPSRFSGSGSGTDFTLTISSLQPEDFATYYCLQFDSYPLTFGGGTKVEIK

SEQ ID NO: 485 - protein, 111 aa, Artificial Sequence
  an artificially synthesized sequence
QSVLTQPPSVSGAPGQRVTISCTGSSSNIGAGYDVHWYQQLPGTAPKLLIYGNSNRPSGVPDRFSGSKSGTSASLAITGLQAEDEADYYCQSYDNSLNAVVFGGGTKLTVL

SEQ ID NO: 486 - protein, 116 aa, Artificial Sequence
  an artificially synthesized sequence
EVQLLESGGGLVQPGGSLRLSCAASGFTFSSYAMSWVRQAPGKGLEWVSAISGSGGSTYYADSVKGRFTISRDNSKNTLYLQMNSLRAEDTAVYYCAKPFPYFDYWGQGTLVTVSS

SEQ ID NO: 487 - protein, 107 aa, Artificial Sequence [sequence omitted]

SEQ ID NO: 488 - protein, 106 aa, Artificial Sequence; identical to SEQ ID NO: 11
  an artificially synthesized sequence

SEQ ID NO: 489 - protein, 123 aa, Artificial Sequence
  an artificially synthesized sequence
RGAGPQGLAGQRGIVAGTVAAPSVFIFPPSDEQLKSGTASVVCLLNNFYPREAKVQWKVDNALQSGNSQESVTEQDSKDSTYSLSSTLTLSKADYEKHKVYACEVTHQGLSSPVTKSFNRGEC

SEQ ID NO: 490 - protein, 124 aa, Artificial Sequence
  an artificially synthesized sequence
RGPPGPQGLAGQRGIVGLTVAAPSVFIFPPSDEQLKSGTASVVCLLNNFYPREAKVQWKVDNALQSGNSQESVTEQDSKDSTYSLSSTLTLSKADYEKHKVYACEVTHQGLSSPVTKSFNRGEC

SEQ ID NO: 491 - protein, 119 aa, Artificial Sequence; identical to SEQ ID NO: 325
  an artificially synthesized sequence

SEQ ID NO: 492 - protein, 451 aa, Artificial Sequence
  an artificially synthesized sequence
DIQMTQSPSSLSASVGDRVTITCRASQWIGRELRWYQQKPGKAPMFLIYHASRLQRGVPSRFSGSGSGTDFTLTISSLQPEDFATYYCQQYHGWPLTFGQGTKVEIKAGAGPQGLAGQRGIVAGSTKGPSVFPLAPSSKSTSGGTAALGCLVKDYFPEPVTVSWNSGALTSGVHTFPAVLQSSGLYSLSSVVTVPSSSLGTQTYICNVNHKPSNTKVDKKVEPKSCDKTHTCPPCPAPELLGGPSVFLFPPKPKDTLMISRTPEVTCVVVDVSHEDPEVKFNWYVDGVEVHNAKTKPREEQYNSTYRVVSVLTVLHQDWLNGKEYKCKVSNKALPAPIEKTISKAKGQPREPQVYTLPPSREEMTKNQVSLTCLVKGFYPSDIAVEWESNGQPENNYKTTPPVLDSDGSFFLYSKLTVDKSRWQQGNVFSCSVMHEALHNHYTQKSLSLSP

SEQ ID NO: 493 - protein, 452 aa, Artificial Sequence
  an artificially synthesized sequence
DIQMTQSPSSLSASVGDRVTITCRASQWIGRELRWYQQKPGKAPMFLIYHASRLQRGVPSRFSGSGSGTDFTLTISSLQPEDFATYYCQQYHGWPLTFGQGTKVEIKAGPPGPQGLAGQRGIVGLSTKGPSVFPLAPSSKSTSGGTAALGCLVKDYFPEPVTVSWNSGALTSGVHTFPAVLQSSGLYSLSSVVTVPSSSLGTQTYICNVNHKPSNTKVDKKVEPKSCDKTHTCPPCPAPELLGGPSVFLFPPKPKDTLMISRTPEVTCVVVDVSHEDPEVKFNWYVDGVEVHNAKTKPREEQYNSTYRVVSVLTVLHQDWLNGKEYKCKVSNKALPAPIEKTISKAKGQPREPQVYTLPPSREEMTKNQVSLTCLVKGFYPSDIAVEWESNGQPENNYKTTPPVLDSDGSFFLYSKLTVDKSRWQQGNVFSCSVMHEALHNHYTQKSLSLSP

SEQ ID NO: 494 - protein, 447 aa, Artificial Sequence
  an artificially synthesized sequence
DIQMTQSPSSLSASVGDRVTITCRASQWIGRELRWYQQKPGKAPMFLIYHASRLQRGVPSRFSGSGSGTDFTLTISSLQPEDFATYYCQQYHGWPLTFGQGTKVEIKATSTSGRSANPRGSTKGPSVFPLAPSSKSTSGGTAALGCLVKDYFPEPVTVSWNSGALTSGVHTFPAVLQSSGLYSLSSVVTVPSSSLGTQTYICNVNHKPSNTKVDKKVEPKSCDKTHTCPPCPAPELLGGPSVFLFPPKPKDTLMISRTPEVTCVVVDVSHEDPEVKFNWYVDGVEVHNAKTKPREEQYNSTYRVVSVLTVLHQDWLNGKEYKCKVSNKALPAPIEKTISKAKGQPREPQVYTLPPSREEMTKNQVSLTCLVKGFYPSDIAVEWESNGQPENNYKTTPPVLDSDGSFFLYSKLTVDKSRWQQGNVFSCSVMHEALHNHYTQKSLSLSP

SEQ ID NO: 495 - protein, 451 aa, Artificial Sequence
  an artificially synthesized sequence
DIQMTQSPSSLSASVGDRVTISCRASQDIYLNLDWYQQKPGKAPKLLINFGSELQSGVPSRFSGSGYGTDFTLTISSLQPEDSATYYCQPSFYYPYTFGQGTKVEIKAGAGPQGLAGQRGIVAGSTKGPSVFPLAPSSKSTSGGTAALGCLVKDYFPEPVTVSWNSGALTSGVHTFPAVLQSSGLYSLSSVVTVPSSSLGTQTYICNVNHKPSNTKVDKKVEPKSCDKTHTCPPCPAPELLGGPSVFLFPPKPKDTLMISRTPEVTCVVVDVSHEDPEVKFNWYVDGVEVHNAKTKPREEQYNSTYRVVSVLTVLHQDWLNGKEYKCKVSNKALPAPIEKTISKAKGQPREPQVYTLPPSREEMTKNQVSLTCLVKGFYPSDIAVEWESNGQPENNYKTTPPVLDSDGSFFLYSKLTVDKSRWQQGNVFSCSVMHEALHNHYTQKSLSLSP

SEQ ID NO: 496 - protein, 452 aa, Artificial Sequence
  an artificially synthesized sequence
DIQMTQSPSSLSASVGDRVTISCRASQDIYLNLDWYQQKPGKAPKLLINFGSELQSGVPSRFSGSGYGTDFTLTISSLQPEDSATYYCQPSFYYPYTFGQGTKVEIKAGPPGPQGLAGQRGIVGLSTKGPSVFPLAPSSKSTSGGTAALGCLVKDYFPEPVTVSWNSGALTSGVHTFPAVLQSSGLYSLSSVVTVPSSSLGTQTYICNVNHKPSNTKVDKKVEPKSCDKTHTCPPCPAPELLGGPSVFLFPPKPKDTLMISRTPEVTCVVVDVSHEDPEVKFNWYVDGVEVHNAKTKPREEQYNSTYRVVSVLTVLHQDWLNGKEYKCKVSNKALPAPIEKTISKAKGQPREPQVYTLPPSREEMTKNQVSLTCLVKGFYPSDIAVEWESNGQPENNYKTTPPVLDSDGSFFLYSKLTVDKSRWQQGNVFSCSVMHEALHNHYTQKSLSLSP

SEQ ID NO: 497 - protein, 447 aa, Artificial Sequence
  an artificially synthesized sequence
DIQMTQSPSSLSASVGDRVTISCRASQDIYLNLDWYQQKPGKAPKLLINFGSELQSGVPSRFSGSGYGTDFTLTISSLQPEDSATYYCQPSFYYPYTFGQGTKVEIKATSTSGRSANPRGSTKGPSVFPLAPSSKSTSGGTAALGCLVKDYFPEPVTVSWNSGALTSGVHTFPAVLQSSGLYSLSSVVTVPSSSLGTQTYICNVNHKPSNTKVDKKVEPKSCDKTHTCPPCPAPELLGGPSVFLFPPKPKDTLMISRTPEVTCVVVDVSHEDPEVKFNWYVDGVEVHNAKTKPREEQYNSTYRVVSVLTVLHQDWLNGKEYKCKVSNKALPAPIEKTISKAKGQPREPQVYTLPPSREEMTKNQVSLTCLVKGFYPSDIAVEWESNGQPENNYKTTPPVLDSDGSFFLYSKLTVDKSRWQQGNVFSCSVMHEALHNHYTQKSLSLSP

SEQ ID NO: 498 - protein, 444 aa, Artificial Sequence
  an artificially synthesized sequence
EVQLLESGGGLVQPGGSLRLSCAASGFTFSSYAMSWVRQAPGKGLEWVSAISGSGGSTYYADSVKGRFTISRDNSKNTLYLQMNSLRAEDTAVYYCAKPFPYFDYWGQGTLVTVSSASTKGPSVFPLAPSSKSTSGGTAALGCLVKDYFPEPVTVSWNSGALTSGVHTFPAVLQSSGLYSLSSVVTVPSSSLGTQTYICNVNHKPSNTKVDKKVEPKSCDKTHTCPPCPAPELLGGPSVFLFPPKPKDTLMISRTPEVTCVVVDVSHEDPEVKFNWYVDGVEVHNAKTKPREEQYNSTYRVVSVLTVLHQDWLNGKEYKCKVSNKALPAPIEKTISKAKGQPREPQVYTLPPSREEMTKNQVSLTCLVKGFYPSDIAVEWESNGQPENNYKTTPPVLDSDGSFFLYSKLTVDKSRWQQGNVFSCSVMHEALHNHYTQKSLSLSP

SEQ ID NO: 499 - protein, 214 aa, Artificial Sequence; identical to SEQ ID NO: 3
  an artificially synthesized sequence

SEQ ID NO: 500 - protein, 217 aa, Artificial Sequence; identical to SEQ ID NO: 6
  an artificially synthesized sequence

SEQ ID NO: 501 - protein, 223 aa, Artificial Sequence
  an artificially synthesized sequence
EVQLLESGGGLVQPGGSLRLSCAASGFTFSSYAMSWVRQAPGKGLEWVSAISGSGGSTYYADSVKGRFTISRDNSKNTLYLQMNSLRAEDTAVYYCAKPFPYFDYWGQGTLVTVSSRTVAAPSVFIFPPSDEQLKSGTASVVCLLNNFYPREAKVQWKVDNALQSGNSQESVTEQDSKDSTYSLSSTLTLSKADYEKHKVYACEVTHQGLSSPVTKSFNRGEC

SEQ ID NO: 502 - protein, 230 aa, Artificial Sequence
  an artificially synthesized sequence
DIQMTQSPSSLSASVGDRVTITCRASQWIGRELRWYQQKPGKAPMFLIYHASRLQRGVPSRFSGSGSGTDFTLTISSLQPEDFATYYCQQYHGWPLTFGQGTKVEIKRGAGPQGLAGQRGIVAGTVAAPSVFIFPPSDEQLKSGTASVVCLLNNFYPREAKVQWKVDNALQSGNSQESVTEQDSKDSTYSLSSTLTLSKADYEKHKVYACEVTHQGLSSPVTKSFNRGEC

SEQ ID NO: 503 - protein, 231 aa, Artificial Sequence
  an artificially synthesized sequence
DIQMTQSPSSLSASVGDRVTITCRASQWIGRELRWYQQKPGKAPMFLIYHASRLQRGVPSRFSGSGSGTDFTLTISSLQPEDFATYYCQQYHGWPLTFGQGTKVEIKRGPPGPQGLAGQRGIVGLTVAAPSVFIFPPSDEQLKSGTASVVCLLNNFYPREAKVQWKVDNALQSGNSQESVTEQDSKDSTYSLSSTLTLSKADYEKHKVYACEVTHQGLSSPVTKSFNRGEC

SEQ ID NO: 504 - protein, 226 aa, Artificial Sequence
  an artificially synthesized sequence
DIQMTQSPSSLSASVGDRVTITCRASQWIGRELRWYQQKPGKAPMFLIYHASRLQRGVPSRFSGSGSGTDFTLTISSLQPEDFATYYCQQYHGWPLTFGQGTKVEIKRTSTSGRSANPRGTVAAPSVFIFPPSDEQLKSGTASVVCLLNNFYPREAKVQWKVDNALQSGNSQESVTEQDSKDSTYSLSSTLTLSKADYEKHKVYACEVTHQGLSSPVTKSFNRGEC

SEQ ID NO: 505 - protein, 230 aa, Artificial Sequence
  an artificially synthesized sequence
DIQMTQSPSSLSASVGDRVTISCRASQDIYLNLDWYQQKPGKAPKLLINFGSELQSGVPSRFSGSGYGTDFTLTISSLQPEDSATYYCQPSFYYPYTFGQGTKVEIKRGAGPQGLAGQRGIVAGTVAAPSVFIFPPSDEQLKSGTASVVCLLNNFYPREAKVQWKVDNALQSGNSQESVTEQDSKDSTYSLSSTLTLSKADYEKHKVYACEVTHQGLSSPVTKSFNRGEC

SEQ ID NO: 506 - protein, 231 aa, Artificial Sequence
  an artificially synthesized sequence
DIQMTQSPSSLSASVGDRVTISCRASQDIYLNLDWYQQKPGKAPKLLINFGSELQSGVPSRFSGSGYGTDFTLTISSLQPEDSATYYCQPSFYYPYTFGQGTKVEIKRGPPGPQGLAGQRGIVGLTVAAPSVFIFPPSDEQLKSGTASVVCLLNNFYPREAKVQWKVDNALQSGNSQESVTEQDSKDSTYSLSSTLTLSKADYEKHKVYACEVTHQGLSSPVTKSFNRGEC

SEQ ID NO: 507 - protein, 226 aa, Artificial Sequence
  an artificially synthesized sequence
DIQMTQSPSSLSASVGDRVTISCRASQDIYLNLDWYQQKPGKAPKLLINFGSELQSGVPSRFSGSGYGTDFTLTISSLQPEDSATYYCQPSFYYPYTFGQGTKVEIKRTSTSGRSANPRGTVAAPSVFIFPPSDEQLKSGTASVVCLLNNFYPREAKVQWKVDNALQSGNSQESVTEQDSKDSTYSLSSTLTLSKADYEKHKVYACEVTHQGLSSPVTKSFNRGEC

SEQ ID NO: 508 - protein, 16 aa, Artificial Sequence
  an artificially synthesized sequence
GAGPQGLAGQRGIVAG

SEQ ID NO: 509 - protein, 17 aa, Artificial Sequence
  an artificially synthesized sequence
GPPGPQGLAGQRGIVGL

SEQ ID NO: 510 - protein, 12 aa, Artificial Sequence
  an artificially synthesized sequence
TSTSGRSANPRG

SEQ ID NO: 511 - protein, 328 aa, Artificial Sequence
  an artificially synthesized sequence
ASTKGPSVFPLAPSSKSTSGGTAALGCLVKDYFPEPVTVSWNSGALTSGVHTFPAVLQSSGLYSLSSVVTVPSSSLGTQTYICNVNHKPSNTKVDKKVEPKSCDKTHTCPPCPAPELLGGPSVFLFPPKPKDTLMISRTPEVTCVVVDVSHEDPEVKFNWYVDGVEVHNAKTKPREEQYNSTYRVVSVLTVLHQDWLNGKEYKCKVSNKALPAPIEKTISKAKGQPREPQVYTLPPSREEMTKNQVSLTCLVKGFYPSDIAVEWESNGQPENNYKTTPPVLDSDGSFFLYSKLTVDKSRWQQGNVFSCSVMHEALHNHYTQKSLSLSP

SEQ ID NO: 512 - protein, 246 aa, Artificial Sequence
  an artificially synthesized sequence
EVQLVESGGGVVQPGRSLRLSCSASGFIFSRYDMSWVRQAPGKGLEWVAYISHGGAGTYYPDSVKGRFTISRDNSKNTLFLQMDSLRPEDTGVYFCARGGVTKGYFDVWGQGTPVTVSSASTKGPQVQLVESGGGVVQPGRSLRLSCTASGFTFSMFGVHWVRQAPGKGLWVAAVSYDGSNKYYAESVKGRFTISRDNSKNILFLQMDSLRLEDTAVYYCARGRPKVVIPAPLAHWGQGTLVTFSS

SEQ ID NO: 513 - protein, 118 aa, Artificial Sequence [sequence omitted]

SEQ ID NO: 514 - protein, 120 aa, Artificial Sequence [sequence omitted]

SEQ ID NO: 515 - protein, 118 aa, Artificial Sequence
  an artificially synthesized sequence
EVQLMQSGAEVKKPGESLKISCKGSGYSFSFHWIAWVRQMPGKGLEWMGIIHPGASDTRYSPSFQGQVTISADNSNSATYLQWSSLKASDTAMYFCARQRELDYFDYWGQGTLVTVSS

SEQ ID NO: 516 - protein, 120 aa, Artificial Sequence
  an artificially synthesized sequence
QVQLVESGGGVVQPGRSLRLSCAASGFTFSNYGMHWVRQAPGKGLEWVAGIWNDGINKYHAHSVRGRFTISRDNSKNTLYLQMNSPRAEDTAVYYCARARSFDWLLFEFWGQGTLVTVSS

SEQ ID NO: 517 - protein, 120 aa, Artificial Sequence
  an artificially synthesized sequence
QVQLVESGGGVVQPGRSLRLSCAVSGFTFSNYGMHWVRQAPGKGLEWVAAIWNDGENKHHAGSVRGRFTISRDNSKNTLYLQMNSLRAEDTAVYYCARGRYFDWLLFEYWGQGTLVTVSS

SEQ ID NO: 518 - protein, 122 aa, Artificial Sequence
  an artificially synthesized sequence
QVQLVESGGGVVQPGRSLRLSCTASGFTFSMFGVHWVRQAPGKGLEWVAAVSYDGSNKYYAESVKGRFTISRDNSKNILFLQMDSLRLEDTAVYYCARGRPKVVIPAPLAHWGQGTLVTFSS

SEQ ID NO: 519 - protein, 220 aa, Artificial Sequence
  an artificially synthesized sequence
DIQMTQSPSSLSASVGDRVTITCRASGNIHNYLTWYQQTPGKAPKLLIYNAKTLADGVPSRFSGSGSGTDYTFTISSLQPEDIATYYCQHFWSIPYTFGQGTKLQITRTVAAPDIQMTQSPSSVSASVGDRVTITCRASQGISSWLAWYQQKPGKAPKLLIYEASNLETGVPSRFSGSGSGSDFTLTISSLQPEDFATYYCQQTSSFLLSFGGGTKVEHK

SEQ ID NO: 520 - protein, 107 aa, Artificial Sequence [sequence omitted]

SEQ ID NO: 521 - protein, 107 aa, Artificial Sequence [sequence omitted]

SEQ ID NO: 522 - protein, 107 aa, Artificial Sequence
  an artificially synthesized sequence
EIVLTQSPDFQSVTPKEKVTITCRASQSIGSSLHWYQQKPDQSPKLLIKYASQSFSGVPSRFSGSGSGTDFTLTINSLEAEDAAAYYCHQSSSLPLTFGGGTKVEIK

SEQ ID NO: 523 - protein, 108 aa, Artificial Sequence [sequence omitted]

SEQ ID NO: 524 - protein, 108 aa, Artificial Sequence [sequence omitted]

SEQ ID NO: 525 - protein, 107 aa, Artificial Sequence
  an artificially synthesized sequence
DIQMTQSPSSVSASVGDRVTITCRASQGISSWLAWYQQKPGKAPKLLIYEASNLETGVPSRFSGSGSGSDFTLTISSLQPEDFATYYCQQTSSFLLSFGGGTKVEHK

SEQ ID NO: 526 - protein, 153 aa, Artificial Sequence
  an artificially synthesized sequence
MRPSGRKSSKMQAFRIWDVNQKTFYLRNNQLVAGYLQGPNVNLEEKIDVVPIEPHALFLGIHGGKMCLSCVKSGDETRLQLEAVNITDLSENRKQDKRFAFIRSDSGPTTSFESAACPGWFLCTAMEADQPVSLTNMPDEGVMVTKFYFQEDE

SEQ ID NO: 527 - protein, 177 aa, Homo sapiens
MEICRGLRSHLITLLLFLFHSETICRPSGRKSSKMQAFRIWDVNQKTFYLRNNQLVAGYLQGPNVNLEEKIDVVPIEPHALFLGIHGGKMCLSCVKSGDETRLQLEAVNITDLSENRKQDKRFAFIRSDSGPTTSFESAACPGWFLCTAMEADQPVSLTNMPDEGVMVTKFYFQEDE

SEQ ID NO: 528 - protein, 569 aa, Homo sapiens
MKVLLRLICFIALLISSLEADKCKEREEKIILVSSANEIDVRPCPLNPNEHKGTITWYKDDSKTPVSTEQASRIHQHKEKLWFVPAKVEDSGHYYCVVRNSSYCLRIKISAKFVENEPNLCYNAQAIFKQKLPVAGDGGLVCPYMEFFKNENNELPKLQWYKDCKPLLLDNIHFSGVKDRLIVMNVAEKHRGNYTCHASYTYLGKQYPITRVIEFITLEENKPTRPVIVSPANETMEVDLGSQIQLICNVTGQLSDIAYWKWNGSVIDEDDPVLGEDYYSVENPANKRRSTLITVLNISEIESRFYKHPFTCFAKNTHGIDAAYIQLIYPVTNFQKHMIGICVTLTVIIVCSVFIYKIFKIDIVLWYRDSCYDFLPIKASDGKTYDAYILYPKTVGEGSTSDCDIFVFKVLPEVLEKQCGYKLFIYGRDDYVGEDIVEVINENVKKSRRLIIILVRETSGFSWLGGSSEEQIAMYNALVQDGIKVVLLELEKIQDYEKMPESIKFIKQKHGAIRWSGDFTQGPQSAKTRFWKNVRYHMPVQRRSPSSKHQLLSPATKEKLQREAHVPLG

SEQ ID NO: 529 - protein, 398 aa, Homo sapiens
MLRLYVLVMGVSAFTLQPAAHTGAARSCRFRGRHYKREFRLEGEPVALRCPQVPYWLWASVSPRINLTWHKNDSARTVPGEEETRMWAQDGALWLLPALQEDSGTYVCTTRNASYCDKMSIELRVFENTDAFLPFISYPQILTLSTSGVLVCPDLSEFTRDKTDVKIQWYKDSLLLDKDNEKFLSVRGTTHLLVHDVALEDAGYYRCVLTFAHEGQQYNITRSIELRIKKKKEETIPVIISPLKTISASLGSRLTIPCKVFLGTGTPLTTMLWWTANDTHIESAYPGGRVTEGPRQEYSENNENYIEVPLIFDPVTREDLHMDFKCVVHNTLSFQTLRTTVKEASSTFSWGIVLAPLSLAFLVLGGIWMHRRCKHRTGKADGLTVLWPHHQDFQSYPK

SEQ ID NO: 530 - protein, 271 aa, Homo sapiens
MAKVPDMFEDLKNCYSENEEDSSSIDHLSLNQKSFYHVSYGPLHEGCMDQSVSLSISETSKTSKLTFKESMVVVATNGKVLKKRRLSLSQSITDDDLEAIANDSEEEIIKPRSAPFSFLSNVKYNFMRIIKYEFILNDALNQSIIRANDQYLTAAALHNLDEAVKFDMGAYKSSKDDAKITVILRISKTQLYVTAQDEDQPVLLKEMPEIPKTITGSETNLLFFWETHGTKNYFTSVAHPNLFIATKQDYWVCLAGGPPSITDFQILENQA

SEQ ID NO: 531 - protein, 269 aa, Homo sapiens
MAEVPELASEMMAYYSGNEDDLFFEADGPKQMKCSFQDLDLCPLDGGIQLRISDHHYSKGFRQAASVVVAMDKLRKMLVPCPQTFQENDLSTFFPFIFEEEPIFFDTWDNEAYVHDAPVRSLNCTLRDSQQKSLVMSGPYELKALHLQGQDMEQQVVFSMSFVQGEESNDKIPVALGLKEKNLYLSCVLKDDKPTLQLESVDPKNYPKKKMEKRFVFNKIEINNKLEFESAQFPNWYISTSQAENMPVFLGGTKGGQDITDFTMQFVSS

SEQ ID NO: 532 - protein, 570 aa, Homo sapiens
MTLLWCVVSLYFYGILQSDASERCDDWGLDTMRQIQVFEDEPARIKCPLFEHFLKFNYSTAHSAGLTLIWYWTRQDRDLEEPINFRLPENRISKEKDVLWFRPTLLNDTGNYTCMLRNTTYCSKVAFPLEVVQKDSCFNSPMKLPVHKLYIEYGIQRITCPNVDGYFPSSVKPTITWYMGCYKIQNFNNVIPEGMNLSFLIALISNNGNYTCVVTYPENGRTFHLTRTLTVKVVGSPKNAVPPVIHSPNDHVVYEKEPGEELLIPCTVYFSFLMDSRNEVWWTIDGKKPDDITIDVTINESISHSRTEDETRTQILSIKKVTSEDLKRSYVCHARSAKGEVAKAAKVKQKVPAPRYTVELACGFGATVLLVVILIVVYHVYWLEMVLFYRAHFGTDETILDGKEYDIYVSYARNAEEEEFVLLTLRGVLENEFGYKLCIFDRDSLPGGIVTDETLSFIQKSRRLLVVLSPNYVLQGTQALLELKAGLENMASRGNINVILVQYKAVKETKVKELKRAKTVLTVIKWKGEKSKYPQGRFWKQLQVAMPVKKSPRRSSSDEQGLSYSSLKNV

SEQ ID NO: 533 - protein, 107 aa, Artificial Sequence
  an artificially synthesized sequence
DIQMTQSPSSLSASVGDRVTITCRASQFIDTSLEWYQQKPGKAPKLLIYDGSHLQSGVPSRFSGSGSGTDFTLTISSLQPEDLATYYCQQYWVLPLTFGQGTKVEIK

SEQ ID NO: 534 - protein, 441 aa, Artificial Sequence
  an artificially synthesized sequence
EVQLVQSGAEVKKPGESLRISCKGSGYSFSTYWISWVRQMPGKGLEWMGKIYPGDSYTNYSPSFQGQVTISADKSISTAYLQWSSLKASDTAMYYCARGYGIFDYWGQGTLVTVSSASTKGPSVFPLAPCSRSTSESTAALGCLVKDYFPEPVTVSWNSGALTSGVHTFPAVLQSSGLYSLSSVVTVPSSSLGTKTYTCNVDHKPSNTKVDKRVESKYGPPCPSCPAPEFLGGPSVFLFPPKPKDTLMISRTPEVTCVVVDVSQEDPEVQFNWYVDGVEVHNAKTKPREEQFNSTYRVVSVLTVLHQDWLNGKEYKCKVSNKGLPSSIEKTISKAKGQPREPQVYTLPPSQEEMTKNQVSLTCLVKGFYPSDIAVEWESNGQPENNYKTTPPVLDSDGSFFLYSRLTVDKSRWQEGNVFSCSVMHEALHNHYTQKSLSLSL

SEQ ID NO: 535 - protein, 444 aa, Artificial Sequence
  an artificially synthesized sequence
EVQLVQSGAEVKKPGESLRISCKGSGYSFSTYWISWVRQMPGKGLEWMGKIYPGDSYTNYSPSFQGQVTISADKSISTAYLQWSSLKASDTAMYYCARGYGIFDYWGQGTLVTVSSASTKGPSVFPLAPSSKSTSGGTAALGCLVKDYFPEPVTVSWNSGALTSGVHTFPAVLQSSGLYSLSSVVTVPSSSLGTQTYICNVNHKPSNTKVDKKVEPKSCDKTHTCPPCPAPELLGGPSVFLFPPKPKDTLMISRTPEVTCVVVDVSHEDPEVKFNWYVDGVEVHNAKTKPREEQYNSTYRVVSVLTVLHQDWLNGKEYKCKVSNKALPAPIEKTISKAKGQPREPQVYTLPPSRDELTKNQVSLTCLVKGFYPSDIAVEWESNGQPENNYKTTPPVLDSDGSFFLYSKLTVDKSRWQQGNVFSCSVMHEALHNHYTQKSLSLSP

SEQ ID NO: 536 - protein, 440 aa, Artificial Sequence
  an artificially synthesized sequence
EVQLVQSGAEVKKPGESLRISCKGSGYSFSTYWISWVRQMPGKGLEWMGKIYPGDSYTNYSPSFQGQVTISADKSISTAYLQWSSLKASDTAMYYCARGYGIFDYWGQGTLVTVSSASTKGPSVFPLAPCSRSTSESTAALGCLVKDYFPEPVTVSWNSGALTSGVHTFPAVLQSSGLYSLSSVVTVPSSNFGTQTYTCNVDHKPSNTKVDKTVERKCCVECPPCPAPPVAGPSVFLFPPKPKDTLMISRTPEVTCVVVDVSHEDPEVQFNWYVDGVEVHNAKTKPREEQFNSTFRVVSVLTVVHQDWLNGKEYKCKVSNKGLPAPIEKTISKTKGQPREPQVYTLPPSREEMTKNQVSLTCLVKGFYPSDIAVEWESNGQPENNYKTTPPMLDSDGSFFLYSKLTVDKSRWQQGNVFSCSVMHEALHNHYTQKSLSLSP

SEQ ID NO: 537 - protein, 448 aa, Artificial Sequence
  an artificially synthesized sequence
QVQLVESGGGVVQPGRSLRLSCAASGFTFSSYTMHWVRQAPGKGLEWVTFISYDGNNKYYADSVKGRFTISRDNSKNTLYLQMNSLRAEDTAIYYCARTGWLGPFDYWGQGTLVTVSSAKTTAPSVYPLAPVCGDTTGSSVTLGCLVKGYFPEPVTLTWNSGSLSSGVHTFPAVLQSDLYTLSSSVTVTSSTWPSQSITCNVAHPASSTKVDKKIEPRGPTIKPCPPCKCPAPNLLGGPDVFIFPPKIKDVLMISLSPIVTCVVVDVSEDDPDVQISWFVNNVEVHTAQTQTHREDYNSTLRVVSALPIQHQDWMSGKEFKCKVNNKDLPAPIERTISKPKGSVRAPQVYVLPPPEEEMTKKQVTLTCMVTDFMPEDIYVEWTNNGKTELNYKNTEPVLDSDGSYFMYSKLRVEKKNWVERNSYSCSVVHEGLHNHHTTKSFSRTPGK

SEQ ID NO: 538 - protein, 232 aa, Artificial Sequence
  an artificially synthesized sequence
DIQMTQSPSSLSASVGDRVTITCRASQFIDTSLEWYQQKPGKAPKLLIYDGSHLQSGVPSRFSGSGSGTDFTLTISSLQPEDLATYYCQQYWVLPLTFGQGTKVEIKGSGLSGRSDNHGSSGGSSRTVAAPSVFIFPPSDEQLKSGTASVVCLLNNFYPREAKVQWKVDNALQSGNSQESVTEQDSKDSTYSLSSTLTLSKADYEKHKVYACEVTHQGLSSPVTKSFNRGEC

SEQ ID NO: 539 - protein, 157 aa, Artificial Sequence
  an artificially synthesized sequence
DYKDDDDKMQKGDQNPQIAAHVISEASSKTTSVLQWAEKGYYTMSNNLVTLENGKQLTVKRQGLYYIYAQVTFCSNREASSQAPFIASLCLKSPGRFERILLRAANTHSSAKPCGQQSIHLGGVFELQPGASVFVNVTDPSQVSHGTGFTSFGLLKL

SEQ ID NO: 540 - protein, 108 aa, Artificial Sequence
  an artificially synthesized sequence
DIQMTQSPSSLSASVGDRVTITCRASQSIYYFLHWYQQKPGKAPKLLIYRASSLQSGVPSRFSGSGSGTDFTLTISSLQPEDFATYYCQQVWRPPLTFGQGTKVEIKR

SEQ ID NO: 541 - protein, 108 aa, Artificial Sequence
  an artificially synthesized sequence
DIQMTQSPSSLSASVGDRVTITCRASQSIYQSLDWYQQKPGKAPKLLIYYASVLQSGVPSRFSGSGSGTDFTLTISSLQPEDFATYYCQQLSRPPFTFGQGTKVEIKR

SEQ ID NO: 542 - protein, 108 aa, Artificial Sequence
  an artificially synthesized sequence
DIQMTQSPSSLSTSVGDRVTITCRASQSIEEMLYWYQQKPGKAPKLLIYNASRLQSGVPSRFSGSGSGTDFILTISSLQPEDFATYYCRQVVGTPHTFGQGTKVEIKR

SEQ ID NO: 543 - protein, 108 aa, Artificial Sequence
  an artificially synthesized sequence
DIQMTQSPSSLSASVGDRVTITCRASQSIDDYLNWYQQKPGKAPKLLIYWASRLQSGVPSRFSGSGSGTDFTLTISSLQPEDFATYYCQQRWLTPSTFGQGTKVEIKR

SEQ ID NO: 544 - protein, 108 aa, Artificial Sequence
  an artificially synthesized sequence
DIQMTQSPSSLSASVGDRVTITCRASQSIEEMLYWYQQKPGKAPKLLIYNASRLQSGVPSRFSGSGSGTDFTLTISSLQPEDFATYYCRQVVGTPHTFGQGTKVEIKR

SEQ ID NO: 545 - protein, 108 aa, Artificial Sequence
  an artificially synthesized sequence
DIQMTQSPSSLSASVGDRVTITCRASQSIDDYLNWYQQKPGKAPKLLIYWASRLQSGVPSRFSGSGSGTDFTLTISSLQPEDFATYYCQQKWMGPHTFGQGTKVEIKR

SEQ ID NO: 546 - protein, 108 aa, Artificial Sequence
  an artificially synthesized sequence
DIQMTQSPSSLSASVGDRVTITCRASQNIDWGLDWYQQKPGKAPKLLIYMASRLQSGVPSRFSGSGSGTDFTLTISSLQPEDFATYYCQQLSMWPFTFGQGTKVEIKR

SEQ ID NO: 547 - protein, 108 aa, Artificial Sequence
  an artificially synthesized sequence
DIQMTQSPSSLSASVGDRVTITCRASQSILDYLSWYQQKPGKAPKLLIYWASKLQSGVPSRFSGSGSGTDFTLTISSLQPEDFATYYCQQKWMGPHTFGQGTKVEIKR

SEQ ID NO: 548 - protein, 108 aa, Artificial Sequence
  an artificially synthesized sequence
DIQMTQSPSSLSASVGDRVTITCRASQSISEYLYWYQQKPGKAPKLLIYHASTLQSGVPSRFSGSGSGTDFTLTISSLQPEDFATYYCRQYLRPPLTFGQGTKVEIKR

SEQ ID NO: 549 - protein, 108 aa, Artificial Sequence
  an artificially synthesized sequence
DIQMTQSPSSLSASVGDRVTITCRASQWIGVSLNWYQQKPGKAPKLLIYQSSLLQSGVPSRFSGSGSGTDFTLTISSLQPEDFATYYCQQVYIFPFTFGQGTKVEIKR

SEQ ID NO: 550 - protein, 108 aa, Artificial Sequence
  an artificially synthesized sequence
DIQMTQSPSSLSASVGDRVTITCRASQPIERWLYWYQQKPGKAPKLLIYGASELQSGVPSRFSGRGSGTDFTLTISSLQPEDFATYYCQQYHAYPFTFGQGTKVEIKR

SEQ ID NO: 551 - protein, 108 aa, Artificial Sequence
  an artificially synthesized sequence
DIQMTQSPSSLSASVGDRVTITCRASQNIEWYLNWYQQKPGKAPKLLIYGSSLLQSGVPSRFSGSGSGTDFTLTISSLQPEDFATYYCQQDWSSPFTFGQGTKVEIKR

SEQ ID NO: 552 - protein, 108 aa, Artificial Sequence
  an artificially synthesized sequence
DIQMTQSPSFLSASVGDRVTITCRASQVIGITLNWYQQKPGKAPKLLIYQGSLLQSGVPSRFSGSGSGTDFTLTINSLQPEDFATYYCQQSWQTPFTFGQGTKVEIKR

SEQ ID NO: 553 - protein, 108 aa, Artificial Sequence
  an artificially synthesized sequence
DIQMTQSPSSLSASVGDRVTITCRASQEIRAALQWYQQKPGKAPKLLIYQVSILQSGVPSRFSGSGSGTDFTLTISSLQPEDFATYYCQQSDRYPFTFGQGTKVEIKR

SEQ ID NO: 554 - protein, 108 aa, Artificial Sequence
  an artificially synthesized sequence
DIQMTQSPSSLSASVGDRVTITCRASQYIAEFLYWYQQKPGKAPKLLIYKASILQSGVPSRFSGSGSGTDFTLTISSLQPEDFATYYCQQYNAYPFTFGQGTKVEIKR

SEQ ID NO: 555 - protein, 108 aa, Artificial Sequence
  an artificially synthesized sequence
DIQMTQSPSSLSASVGDRVTITCRASQSINQVLNWYQQKPGKAPKLLIYQASLLQSGVPSRFSGSGSGTDFTLTISSLQPEDFATYYCQQFWGFPFTFGQGTKVEIKR

SEQ ID NO: 556 - protein, 108 aa, Artificial Sequence
  an artificially synthesized sequence
DIQMTQSPSSLSASVGDRVTITCRASQSIEHWLYWYQQKPGKAPKLLIYHASQLQSGVPSRFSGSGSGTDFTLTISSLQPEDFATYYCQQYHLPPMTFGQGTKVEIKR

SEQ ID NO: 557 - protein, 108 aa, Artificial Sequence
  an artificially synthesized sequence
DIQMTQSPSSLSASVGDRVTITCRASQSIKVYLRWYQQKPGKAPKLLIYKASLLQSGVPSRFSGSGSGTDFTLTISSLQPEDFATYYCQQDFDHPSTFGQGTKVEIKR

SEQ ID NO: 558 - protein, 108 aa, Artificial Sequence
  an artificially synthesized sequence
DIQMTQSPSSLSASVGDRVTITCRASQSIEFFLYWYQQKPGKTPKLLIYHASWLQSGVPSRFSGSGSGTDFTLTISSLQPEDFATYYCQQYFSYPLTFGQGTKVEIKR

SEQ ID NO: 559 - protein, 108 aa, Artificial Sequence
  an artificially synthesized sequence
DIQMTQSPSSLSASVEDRVTITCRASQSIYYFLHWYQQKPGKAPKLLIYRASSLQSGVPSRFSGSGSGTDFTLTISSLQPEDFATYYCQQVWRPPLTFGQGTKVEIKR

SEQ ID NO: 560 - protein, 108 aa, Artificial Sequence
  an artificially synthesized sequence
DIQMTQSPSSLSASVGDRVTITCRASQSITVELRWYQQKPGKAPKLLIYHASRLQSGVPSRFSGSGSGTDFTLTISSLQPEDFATYYCQQYATWPLTFGQGTKVEIKR

SEQ ID NO: 561 - protein, 108 aa, Artificial Sequence
  an artificially synthesized sequence
DIQMTQSPSSLSASVGDRVTITCRASQSIYLSLLWYQQKPGKTPKLLIYNASRLQSGVPSRFSGSGSGTDFTLTISSLQPEDFATYYCQQSWEWPFTFGQGTKVEIKR

SEQ ID NO: 562 - protein, 108 aa, Artificial Sequence
  an artificially synthesized sequence
DIQMTQSPSSLSASVGDRVTITCRASQSISSYLNWYQQKPGKAPKLLIYGASILQSGVPSRFSGSGSGTDFTLTISSLQPEDFATYYCQQWVWLPITFGQGTKVEIKR

SEQ ID NO: 563 - protein, 108 aa, Artificial Sequence
  an artificially synthesized sequence
DIQMTQSPSSLSASVGDRVTITCRASQSIQQWLYWYQQKPGKAPKLLIYKASILQSGVPSRFSGSGSGTDFTLTISSLQPEDFATYYCQQYERYPFTFGQGTKVEIKR

SEQ ID NO: 564 - protein, 108 aa, Artificial Sequence
  an artificially synthesized sequence
DIQMTQSPSSLSASVGDRVTITCRASQSITHALKWYQQKPGKAPKLLIYKASFLQSGVPSRFSGSGSGTDFTLTISSLQPEDFATYYCQQSQLLPMTFGQGTKVEIKR

SEQ ID NO: 565 - protein, 108 aa, Artificial Sequence
  an artificially synthesized sequence
DIQMTQSPSSLSASVGDRVTITCRASQSIYNYLTWYQQKPGKAPKLLIYGASMLQSGVPSRFSGSGSGTDFTLTISSLQPEDFATYYCQQERSGPYTFGQGTKVEIKR

SEQ ID NO: 566 - protein, 108 aa, Artificial Sequence
  an artificially synthesized sequence
DIQMTQSPSSLSASVGDRVTITCRASQSISSYLNWYQQKPGKAPKLLIYFASRLQSGVPSRFSGSGSGTDFTLTISSLQPEDFATYYCQQNMLLPVTFGQGTKVEIKR

SEQ ID NO: 567 - protein, 108 aa, Artificial Sequence
  an artificially synthesized sequence
DIQMTQSPSSLSASVGDRVTITCRASQSIRHFLYWYQQKPGKAPKLLIYHASVLQSGVPSRFSGSGSGTDFTLTISSLQPEDFATYYCQQYGDLPFTFGQGTKVEIKR

SEQ ID NO: 568 - protein, 108 aa, Artificial Sequence
  an artificially synthesized sequence
DIQMTQSPPSLSASVGDRVTITCRASQSIGWWLYWYQQKPGKAPKLLIYHASRLQSGVPSRFSGSGSGTDFTLTISSLQPEDFATYYCQQYNSTPFTFGQGTKVEIKR

SEQ ID NO: 569 - protein, 108 aa, Artificial Sequence
  an artificially synthesized sequence
DIQMTQSPSSLSASVGDRVTITCRASQSIDRFLAWYQQKPGKAPKLLIYHASDLQSGVPSRFSGSGSGTDFTLTISSLQPEDFATYYCQQFDQWPFTFGQGTKVEIKR

SEQ ID NO: 570 - protein, 108 aa, Artificial Sequence
  an artificially synthesized sequence
DIQMTQSPSSLSASVGDRVTITCRASQSIKSRLAWYQQKPGKAPKLLIYKASLLQSGVPSRFSGSGSGTDFTLTISSLQPEDFATYYCQQYSRNPITFGQGTKVEIKR

SEQ ID NO: 571 - protein, 108 aa, Artificial Sequence
  an artificially synthesized sequence
DIQMTQSPSSLSASVGDRVTITCRASQSISRSLHWYQQKPGKAPKLLIYRASRLQSGVPSRFSGSGSGTDFTLTISSLQPEDFATYYCQQNRLRPHTFGQGTKVEIKR

SEQ ID NO: 572 - protein, 108 aa, Artificial Sequence
  an artificially synthesized sequence
DIQMTQSPSSLSASVGDRVTITCRASQSIKQFLYWYQQKPGKAPKLLIYQASYLQSGVPSRFSGSGSGTDFTLTISSLQPEDFATYYCQQYEVYPFTFGQGTKVEIKR

SEQ ID NO: 573 - protein, 108 aa, Artificial Sequence
  an artificially synthesized sequence
DIQMTQSPSSLSASVGDRVTITCRASQSIYHYLYWYQQKPGKAPKLLIYAASLLQSGVPSRFSGSGSGTDFTLTISSLQPEDFATYYCQQYQLYPFTFGQGTKVEIKR

SEQ ID NO: 574 - protein, 108 aa, Artificial Sequence
  an artificially synthesized sequence
DIQMTQSPSSLSASVGDRVTITCRASQSISSYLNWYQQKPGKAPKLLIYFASSLQSGVPSRFSGSGSGTDFTLTISSLQPEDFATYYCQQGWDVPYTFGQGTKVEIKR

SEQ ID NO: 575 - protein, 108 aa, Artificial Sequence
  an artificially synthesized sequence
DIQMTQSPSSLSASVGDRVTITCRASQSIDNWLRWYQQKPGKAPKLLIYSASFLQSGVPSRFSGSGSGTDFTLTISSLQPEDFATYYCQQGRSAPQTFGQGTKVEIKR

SEQ ID NO: 576 - protein, 108 aa, Artificial Sequence
  an artificially synthesized sequence
DIQMTQSPSSLSASVGDRVTITCRASQSIWYWLSWYQQKPGKAPKLLIYYASSLQSGVPSRFSGSGSGTDFTLTISSLQPEDFATYYCQQMSSTPFTFGQGTKVEIKR

SEQ ID NO: 577 - protein, 108 aa, Artificial Sequence
  an artificially synthesized sequence
DIQMTQSPSSLSASVGDRVTITCRASQSITMRLGWYQQKPGKAPKLLIYNASHLQSGVPSRFSGSGSGTDFTLTISSLQPEDFATYYCQQYFDYPTTFGQGTKVEIKR

SEQ ID NO: 578 - protein, 108 aa, Artificial Sequence
  an artificially synthesized sequence
DIQMTQSPSSLSASVGDRVTITCRASQSIHWLLSWYQQKPGKAPKLLIYAASSLQSGVPSRFSGSGSGTDFTLTISSLQPEDFATYYCQQNLARPFTFGQGTKVEIKR

SEQ ID NO: 579 - protein, 108 aa, Artificial Sequence
  an artificially synthesized sequence
DIQMTQSPSSLSASVGDRVTITCRASQSIGERLWWYQQKPGKAPKLLIYNSSVLQSGVPSRFSGSGSGTDFTLTISSLQPEDFATYYCQQSWRGPATFGQGTKVEIKR

SEQ ID NO: 580 - protein, 108 aa, Artificial Sequence
  an artificially synthesized sequence
DIQMTQSPSSLSASVGDRVTITCRASQDIDRALQWYQQKPGKAPKLLIYMSSVLQSGVPSRFSGSGSGTDFTLTISSLQPEDFATYYCQQQAGYPFTFGQGTKVEIKR

SEQ ID NO: 581 - protein, 108 aa, Artificial Sequence
  an artificially synthesized sequence
DIQMTQSPSSLSASVGDRVTITCRASQNIDRELRWYQQKPGKAPMLLIYHASRLQSGVPSRFSGSGSGTDFTLTISSLQPEDFATYYCQQYFTWPLTFGQGTKVEIKR

SEQ ID NO: 582 - protein, 108 aa, Artificial Sequence
  an artificially synthesized sequence
DIQMTQSPSSLSASVGDRVTITCRASQSISTSLQWYQQKPGKAPKLLIYSSSTLQSGVPSRFSGSGSGTDFTLTISSLQPEDFATYYCQQQWEYPFTFGQGTKVEIKR

SEQ ID NO: 583 - protein, 108 aa, Artificial Sequence
  an artificially synthesized sequence
DIQMTQSPSSLSASVGDRVTITCRASQNIGTALSWYQQKPGKAPKLLIYWASILQSGVPSRFSGSGSGTDFTLTISSLQPEDFATYYCQQTNSWPFTFGQGTKVEIKR

SEQ ID NO: 584 - protein, 108 aa, Artificial Sequence
  an artificially synthesized sequence
DIQMTQSPSSLSASVGDRVTITCRASQKIDDALQWYQQKPGKAPKLLIYLASHLQSGVPSRFSGSGSGTDFTLTISSLQPEDFATYYCQQQSNWPFTFGQGTKVEIKR

SEQ ID NO: 585 - protein, 108 aa, Artificial Sequence
  an artificially synthesized sequence
DIRMTQSPSSLSASVGDRVTITCRASQSIGRALQWYQQKPGKAPKLLIYQRSMLQSGVPSRFSGSGSGTDFTLTISSLQPEDFATYYCQQSYLWPFTFGQGTKVEIKR

SEQ ID NO: 586 - protein, 108 aa, Artificial Sequence
  an artificially synthesized sequence
DIQMTQSPSSLSASVGDRVTITCRASQEIGKELLWYQQKPGKAPKLLIYDVSVLQSGVPSRFSGSGSGTDFTLTISSLQPEDFATYYCQQYQSYPNTFGQGTKVEIKR

SEQ ID NO: 587 - protein, 108 aa, Artificial Sequence
  an artificially synthesized sequence
DIQMTQSPSSLSASVGDRVTITCRASQQIMRSLNWYQQKPGKAPKLLIYQSSILQSGVPSRFSGSGSGTDFTLTISSLQPEDFATYYCQQAWQYPFTFGQGTKVEIKR

SEQ ID NO: 588 - protein, 108 aa, Artificial Sequence
  an artificially synthesized sequence
DIQMTQSPSSLSASVGDRVTITCRASQDIQRRLAWYQQKPGKAPKLLIYNVSYLQSGVPSRFSGSGSGTDFTLTISSLQPEDFATYYCQQYNDYPTTFGQGTKVEIKR

SEQ ID NO: 589 - protein, 108 aa, Artificial Sequence
  an artificially synthesized sequence
DIQMTQSPSSLSASVGDRVTITCRASQNIGYSLDWYQQKPGKAPRLLIYFGSRLQSGVPSRFSGSGSGTDFTLTISSLQPEDFATYYCQQLLKPPFTFGQGTKVEIKR

SEQ ID NO: 590 - protein, 108 aa, Artificial Sequence
  an artificially synthesized sequence
DIQMTQSPSSLSASVGDRVTITCRASQRIGPSLLWYQQKPGKAPKLLIYNTSVLQSGVPSRFRGSGSGTDFTLTISSLQPEDFATYYCQQTWNYPFTFGQGTKVEIKR

SEQ ID NO: 591 - protein, 108 aa, Artificial Sequence
  an artificially synthesized sequence
DIQMTQSPSSLSASVGDRVTITCRASQNIESGLWWYQQKPGKAPKLLIYNSSFLQSGVPSRFSGSGSGTDFTLTISSLQPEDFATYYCQQPWQSPTTFGQGTKVEIKR

SEQ ID NO: 592 - protein, 108 aa, Artificial Sequence
  an artificially synthesized sequence
DIQMTQSPSSLSASVGDRVTITCRASQNIGQNLWWYQQKPGKAPKLLIYGSSKLQSGVPPRFSGSGSGTDFTLTISSLQPEDFATYYCQPAWQGPKTFGQGTKVEIKR

SEQ ID NO: 593 - protein, 108 aa, Artificial Sequence
  an artificially synthesized sequence
DIQMTQSPSSLSASVGDRVTITCRASQWISHRLMWYQQKPGKAPKLLIYRASELQSGVPSRFSGSGSGTDFTLTISSLQPEDFATYYCQQNARMPHTFGQGTKVEIKR

SEQ ID NO: 594 - protein, 108 aa, Artificial Sequence
  an artificially synthesized sequence
DIQMTQSPSSLSASVGDRVTITCRASQSIDTGLDWYQQKPGKAPKLLIYRVSTLQSGVPSRFSGSGSGTDFTLTISSLQPEDFATYYCQQLRRPPFTFGQGTKVEIKR

SEQ ID NO: 595 - protein, 108 aa, Artificial Sequence
  an artificially synthesized sequence
DIQMTQSPSSLSASVGDRVTITCRASQNIGSALQWYQQKPGKAPKLLIYQISKLQSGVPSRFSGSGSGTDFTLTISSLQPEDFATYYCQQNESWPFTFGQGTKVEIKR

SEQ ID NO: 596 - protein, 108 aa, Artificial Sequence
  an artificially synthesized sequence
DIQMTQSPSSLSASVGDRVTITCRANQRIESSLNWYQQKPGKAPKLLIYLSSILQSGVPSRFSGSGSGTDFTLTISSLQPEDFATYYCQQQWTYPFTFGQGTKVEIKR

SEQ ID NO: 597 - protein, 108 aa, Artificial Sequence
  an artificially synthesized sequence
DIQMTQSPSSLSASVGDRVTITCRASQNIGKSLDWYQQKPGKAPKLLIYLTSMLQSGVPSRFSGSGSGTDFTLTISSLQPEDFATYYCQQLQRPPFTFGQGTKVEIKR

SEQ ID NO: 598 - protein, 108 aa, Artificial Sequence
  an artificially synthesized sequence
DIQMTQSPSSLSASVGDRVTITCRASQSIGKWLYWYQQKPGKAPKLLIYESSLLQSGVPSRFSGSGSGTDFTLTISSLQPEDFATYYCQQYDIYPFTFGQGTKVEIKR

SEQ ID NO: 599 - protein, 108 aa, Artificial Sequence
  an artificially synthesized sequence
DIQMTQSPSSLSASVGDRVTITCQASQHIGEELLWYQQKPGKDPKLLIYSGSTLQSGVPSRFSGSGSGTDFTLTISSLQPEDFATYYCQQYLVWPNTFGQGTKVEIKR

SEQ ID NO: 600 - protein, 108 aa, Artificial Sequence
  an artificially synthesized sequence
DIQMTQSPSSLSASVGDRVTITCRASQNIKTSLLWYQQKPGKAPKLLIYWASRLQSGVPSRFSGSGSGTDFTLTISSLQPEDFATYYCQQTLDWPFTFGQGTKVEIKR

SEQ ID NO: 601 - protein, 108 aa, Artificial Sequence
  an artificially synthesized sequence
DIQMTQSPSSLSASVGDRVTITCRASQPIWYKLNWYQQKPGKAPKLLIYAASMLQSGVPSRFSGSGSGTDFTLTISSLQPEDFATYYCQQQLIHPYTFGQGTKVEIKR

SEQ ID NO: 602 - protein, 108 aa, Artificial Sequence
  an artificially synthesized sequence
DIQMTQSPSSLSASVGDRVTITCRASQDIDNNLWWYQQKPGKAPKLLIYSASLLQSGVPSRFSGSGSGTDFTLTISSLQPEDFATYYCQQAWTSPKTFGQGTKVEIKR

SEQ ID NO: 603 - protein, 108 aa, Artificial Sequence
  an artificially synthesized sequence
DIQMTQSPSSLSASVGDRVTITCRASQSISEYLYWYQQKPGKAPKLLIYHASVLQRGVPSRFSGSGSGTDFTLTISSLQPEDSATYYCQQYAFSPRTFGQGTKVEIKR

SEQ ID NO: 604 - protein, 108 aa, Artificial Sequence
  an artificially synthesized sequence
DIQMTQSPSSLSASVGDRVTITCRASQGIHISLQWYQQKPGKAPKLLIYQGSILQSGVPSRFSGSGSGTDFTLTISSLQPEDFATYYCQQQYHFPFTFGQGTKVEIKR

SEQ ID NO: 605 - protein, 108 aa, Artificial Sequence
  an artificially synthesized sequence
DIQMTQSPSSLSASVGDRVTITCRASQPILRALAWYQQKPGKAPKLLIYLSSHLQSGVPSRFSGSGSGTDFTLTISSLQPEDFATYYCQQRWVQPYTFGQGTTVEIKR

SEQ ID NO: 606 - protein, 108 aa, Artificial Sequence
  an artificially synthesized sequence
DIQMTQSPSSLSASVGDRVAITCRASQRIMKALNWYQQKPGKAPKLLIYQASLLQSGVPSRFSGGGSGTDFTLTISSLQPEDLATYYCQQTDVWPFTFGQGTKVEIKR

SEQ ID NO: 607 - protein, 108 aa, Artificial Sequence
  an artificially synthesized sequence
DIQMTQSPSSLSASVGDRVTITCRASQVIDRTLYWYQQKPGKAPKLLIYNVSFLQSGVPSRFSGSGSGTDFTLTISSLQPEDFATYYCQQYESKPYTFGQGTKVEIKR

SEQ ID NO: 608 - protein, 108 aa, Artificial Sequence
  an artificially synthesized sequence
DIQMTQSPSSLSASVGDRVTITCRASQPINTFLYWYQQKPGKAPRLLIYKSSILQSGVPSRFSGSGSGTDFTLTISSLQPEDFATYYCQQYNLYPFTFGQGTKVEIKR

SEQ ID NO: 609 - protein, 108 aa, Artificial Sequence
  an artificially synthesized sequence
DIHMTQSPSSLSASVGDRVTITCRASQHIGRSLQWYQQKPGKAPKLLIYYTSILQSGVPSRFSGSGSGTDFTLTISSLQPEDFATYYCQQQGEFPFTFGQGTKVEIKR

SEQ ID NO: 610 - protein, 108 aa, Artificial Sequence
  an artificially synthesized sequence
DIQMTQSPSSLSASVGDRVTITCRASQHIKNFLYWYQQKPGKAPKLLIYHASTLQSGVPSRFSGSGSGTDFTLTISSLQPEDFATYYCQQYMDEPRTFGQGTKVEIKR

SEQ ID NO: 611 - protein, 108 aa, Artificial Sequence
  an artificially synthesized sequence
DIQMTQSPSSLSASVGDRVTITCRASQVISVALNWYQQKPGKAPKLLIYQGSILQSGVPSRFSGSGSGTDFTLTISSLQPEDFATYYCQQSWQWPFTFGQGTKVEIKR

SEQ ID NO: 612 - protein, 108 aa, Artificial Sequence
  an artificially synthesized sequence
DIQMTQSPSSLSASVGDRVTITCRASQAIGNMLYWYQQKPGKAPKLLIYNASYLQSGVPSRFSGSGSGTDFTLTISSLQPEDYATYYCQQREMIPHTFGQGTKVGIKR

SEQ ID NO: 613 - protein, 108 aa, Artificial Sequence
  an artificially synthesized sequence
DIQMTQSPSSLSASVGDRVTITCRASQDIGEELLWYQQKPGKAPKLLIYSASSLRSGVPSRFSGSGSGTDFTLTISSLQPEDFATYYCQQYVTSPNTFGQGTKVEIKR

SEQ ID NO: 614 - protein, 108 aa, Artificial Sequence
  an artificially synthesized sequence
DIQMTQSPSSLSASVGDRVTITCRASQGIQTFLYWYQQKPGKAPKLLIYSSSILQRGVPSRFSGSGSGTDFTLTISSLQPEDFATYYCQQYGNYPFTFGQGTKVEIKR

SEQ ID NO: 615 - protein, 108 aa, Artificial Sequence
  an artificially synthesized sequence
DIQMTQSPSSLSASVGDRVTITCRASQNIDRELRWYQQKPGKAPMLLIYHASRLQSGVPSRFSGSGSGTDFTLTISSLQPEDFATYYCQQYHDFPLTFGQGTKVEIKR

SEQ ID NO: 616 - protein, 108 aa, Artificial Sequence
  an artificially synthesized sequence
DIQMTQSPSSLSASVGDRVTITCRASQQIYNALRWYQQKPGKARKLLIYHKSQLQSGVPSRFSGSGSGTDFTLTISSLQPEDFATYYCQQTYSFPHTFGQGTKVEIKR

SEQ ID NO: 617 - protein, 108 aa, Artificial Sequence
  an artificially synthesized sequence
DIKMTQSPSSLSASVGDRVTITCRASQNIGRELRWYQQKPGKAPKLLIYHASHLQSGVPSRFSGSGSGTDFTLTISSLQPEDFATYYCQQYYYFPLTFGQGTKVEIKR

SEQ ID NO: 618 - protein, 10 aa, Artificial Sequence
  an artificially synthesized sequence
TVSSASTKGP

SEQ ID NO: 619 - protein, 11 aa, Artificial Sequence
  an artificially synthesized sequence
VEIKRTVAAPS

SEQ ID NO: 620 - protein, 4 aa, Artificial Sequence
  an artificially synthesized sequence
KERE

SEQ ID NO: 621 - protein, 4 aa, Artificial Sequence
  an artificially synthesized sequence
KQRE

SEQ ID NO: 622 - protein, 4 aa, Artificial Sequence
  an artificially synthesized sequence
GLEW

SEQ ID NO: 623 - protein, 7 aa, Artificial Sequence
  an artificially synthesized sequence
ASTKGPS

SEQ ID NO: 624 - protein, 7 aa, Artificial Sequence
  an artificially synthesized sequence
RTVAAPS

SEQ ID NO: 625 - protein, 18 aa, Artificial Sequence
  an artificially synthesized sequence
GSGLSGRSDNHGSSGGSS

SEQ ID NO: 626 - protein, 10 aa, Artificial Sequence
  an artificially synthesized sequence
KVEIKRTVAA
